(19) United States
(12) Patent Application Publication
(10) Pub. No.: US 2017/0362290 A1
(43) Pub. Date: Dec. 21, 2017

(54) IL-17A-BINDING POLYPEPTIDES

(71) Applicant: AFFIBODY AB, Solna (SE)

(72) Inventors: Fredrik Frejd, Stockholm (SE); Joachim Feldwisch, Tyresö (SE); Susanne Klint, Stockholm (SE); Lindvi Gudmundsdotter, Stockholm (SE)

(21) Appl. No.: 15/538,890

(22) PCT Filed: Jan. 12, 2016
(86) PCT No.: PCT/EP2016/050456

§ 371 Date: Jun. 22, 2017

(30) Foreign Application Priority Data
Jan. 12, 2015 (EP) 15150786.0

(51) Int. Cl. C07K 14/54; A61K 38/20; C07K 14/745

(52) U.S. Cl. CPC C07K 14/54; C07K 14/745; A61K 38/20; C07K 2318/20

(57) ABSTRACT

The present disclosure relates to a class of engineered polypeptides having a binding affinity for interleukin-17A (IL-17A), and provides an IL-17A binding polypeptide comprising the sequence EX₂DX₄AX₆X₇EIX₁₀X₁₁ LPNL X₁₆X₁₇X₁₈QX₂₀X₂₁AFIX₂₅ X₂₆LX₂₈X₂₉. Also disclosed is the use of such an interleukin-17A binding polypeptide as a diagnostic, prognostic and/or therapeutic agent.

### FIELD OF THE INVENTION

[0001] The present disclosure relates to a class of engineered polypeptides having a binding affinity for interleukin-17A (in the following referred to as IL-17A). The present disclosure also relates to the use of such an interleukin-17A binding polypeptide as a diagnostic, prognostic and/or therapeutic agent.

### BACKGROUND

[0002] The interleukin-17 (IL-17) family is a pro-inflammatory cytokine family that contributes to the pathogenesis of several inflammatory diseases. A major source of IL-17 is a lineage of T cells known as T helper 17 cells (Th17 cells), which are distinct from the classical Th1 and Th2 cell subsets. Results of studies in mouse models and in humans have identified a key role of IL-17 and Th17 cells in the pathogenesis of inflammation and autoimmunity as well as in host defense against certain pathogens. Based on these observations, IL-17 and Th17 cells are considered to be interesting targets for the treatment of several chronic inflammatory diseases such as psoriasis, rheumatoid arthritis (RA), ankylosing spondylitis (AS), systemic lupus erythematosus (SLE) and multiple sclerosis (MS) (Miossec and Kolls, 2012, Nat Rev Drug Discov 11:763-7).

[0003] The disulfide-linked homodimeric cytokine IL-17A is a member of the IL-17 family, which also includes IL-17B, IL-17C, IL-17D, IL-17E and IL-17F. Within the family, IL-17A and IL-17F show the highest amino acid sequence homology to each other (50%) and they bind to the same receptors: IL-17 receptor A (IL-17RA) and IL-17 receptor C (IL-17RC). Furthermore, IL-17A can be expressed with IL-17F as a heterodimer. Although IL-17A and IL-17F share high amino acid sequence homology, they perform distinct functions. IL-17A is involved in the development of autoimmunity, inflammation and tumors and also plays important roles in the host defense against bacterial and fungal infections. IL-17F, on the other hand, is mainly involved in mucosal host defense mechanisms (Iwakura et al, 2011, Immunity 34:149-62).

[0004] When IL-17A is secreted, it promotes the production of a variety of proinflammatory cytokines, chemokines, antimicrobial peptides and metalloproteinases (MMPs) from fibroblast, endothelial and epithelial cells. One important action of IL-17A is to induce granulopoiesis and neutrophil recruitment to inflammatory sites. However, if uncontrolled, this reaction may lead to chronic inflammation with tissue destruction and neovascularization (Iwakura et al. 2008, Immunol Rev 226:57-79; Reynolds et al. 2010, Cytokine Growth Factor Rev 21:413-23). IL-17A is central in the pathogenesis of psoriasis, a common chronic inflammatory skin disease affecting about 2.5% of the worldwide population (reviewed in Chiricozzi and Krueger, 2013, Expert Opin. Investig. Drugs 22(8):993-1005). Studies in patients with RA have shown that IL-17A positive cells are present in the inflamed synovium. In a mouse model of RA, the clinical scores were severely aggravated by administration of IL-17A via intra-articular gene transfer (Lubberts et al. 2002, Inflamm Res 51:102-4). Conversely, inhibition of IL-17A with monoclonal antibodies against the ligand or the receptor protected against development and consequences of arthritis (Lubberts et al. 2004, Arthritis Rheum 50:650-9). In MS patients, the IL-17A gene is reported to be overexpressed (Lock et al. 2002, Nat Med 8:500-8) and IL-17A and Th17 cells have been clearly implicated in the mouse model of experimental autoimmune encephalitis (Cua et al. 2003, Nature 421:744-8; Uyttenhove and Van Snick 2006, Eur J Immunol 36:2868-74). Increased levels of IL-17A have been shown to be clinically correlated with various ocular inflammatory diseases, such as uveitis, scleritis and dry eye disease (DED) in patients suffering from arthritis (Kang et al. 2011, J Korean Med Sci 26:938-44). Recent studies have showed IL-17 and IFNγ positive cells in clinical specimens of coronary atherosclerosis suggesting a local effect on vessel dysfunction (Eid et al. 2009, J Cardiothorac Surg 4:58). IL-17A may also be of interest in chronic obstructive pulmonary disease (COPD). The number of IL-17A positive cells is increased in lung tissues from COPD patients (Chu et al. 2011, Int Immunopharmacol 11:1780-8; Di Stefano et al. 2009, Clin Exp Immunol 157:316-24). IL-17RA deficient mice are resistant to the development of emphysema in a mouse model of COPD whereas overexpression of IL-17A accelerates the development of emphysema suggesting that IL-17A is sufficient to mediate this response (Chen et al. 2011, PLoS One 6:e20333; Shan et al. 2012, Sci Transl Med 4:117ra9). Thus, the involvement of IL-17A in several different autoimmune and inflammatory diseases suggests a wide applicability of therapeutics targeting IL-17A.

[0005] Targeting of IL-17A or its receptors is the most direct way to block IL-17A-mediated functions. Several biologics that neutralize IL-17A signaling are now in clinical development, including the anti-IL-17A monoclonal antibodies secukinumab and ixekizumab (Patel et al, 2013, Ann Rheum Dis 72 Suppl 2:ii116-23). Secukinumab has been approved for the treatment of psoriasis and is currently investigated for the treatment of psoriatic arthritis (PsA) and AS. Ixekizumab is currently in clinical trials for psoriasis, PsA and RA. Blocking of IL-17 receptor mediated signaling is also under investigation in the clinic, including the human monoclonal anti-IL-17RA antibody brodalumab for treatment of psoriasis, RA and asthma (Hu et al. 2011, Ann N Y Acad Sci 1217:60-76). Thus, clinical efficacy of IL-17A-inhibition has been proven in different diseases, notably in psoriasis, and the safety profile, including phase II and phase III data, shows good tolerability for IL-17A inhibitors (Genovese et al. 2010, Arthritis Rheum 62:929-39 and Hueber et al. 2010, Sci Transl Med 2:52ra72).

[0006] The unpredictable and chronic nature of psoriasis and other inflammatory diseases, as well as a high unmet medical need, warrants the development of new modes of treatment.

[0007] Since tissue penetration rate is negatively associated with the size of the molecule, a relatively large antibody molecule inherently has poor tissue distribution and penetration capacity. Moreover, although antibodies are widely used in a variety of routine contexts owing to high affinity and specificity to a multitude of possible antigens, such as for analytical, purification, diagnostic and therapeutic purposes, they still suffer from several drawbacks. Such drawbacks include the need for complex mammalian expression systems, aggregation tendencies, limited solubility, need to form and stably maintain disulfide bonds, and the risk of unwanted immune responses.

[0008] Thus, the use of monoclonal antibodies is not always optimal for therapy, and there is continued need for provision of agents with a high affinity for IL-17A. Of great interest is also the provision of uses of such molecules in the treatment, diagnosis and prognosis of disease.

### SUMMARY OF THE INVENTION

[0009] It is an object of the present disclosure to provide new IL-17A binding agents, which could for example be used for diagnostic, prognostic and therapeutic applications.

[0010] It is an object of the present disclosure to provide new IL-17A binding agents, which may be used as domains in fusion proteins comprising one or more additional domains having similar or other functions.

[0011] It is an object of the present disclosure to provide a molecule allowing for efficient therapy targeting various forms of inflammatory and autoimmune disease while alleviating the abovementioned and other drawbacks of current therapies.

[0012] It is a further object of the present disclosure to provide a molecule suitable for prognostic and diagnostic applications.

[0013] These and other objects which are evident to the skilled person from the present disclosure are met by different aspects of the invention as claimed in the appended claims and as generally disclosed herein.

[0014] Thus, in the first aspect of the disclosure, there is provided an IL-17A binding polypeptide, comprising an IL-17A binding motif BM, which motif consists of an amino acid sequence selected from:
[0015] i) EX₂DX₄AX₆X₇EIX₁₀X₁₁LPNL X₁₆X₁₇X₁₈QX₂₀X₂₁AFIX₂₅ X₂₆LX₂₈X₂₉
[0016] wherein, independently from each other,

[0017] X₂ is selected from A, H, M and Y;

[0018] X₄ is selected from A, D, E, F, K, L, M, N, Q, R, S and Y;

[0019] X₆ is selected from A, Q and W;

[0020] X₇ is selected from F, I, L, M, V, W and Y;

[0021] X₁₀ is selected from A and W;

[0022] X₁₁ is selected from A, D, E, F, G, L, M, N, Q, S, T and Y;

[0023] X₁₆ is selected from N and T;

[0024] X₁₇ is selected from H, W and Y;

[0025] X₁₈ is selected from A, D, E, H and V;

[0026] X₂₀ is selected from A, G, Q, S and W;

[0027] X₂₁ is selected from A, D, E, F, H, K, N, R, T, V, W and Y;

[0028] X₂₅ is selected from A, D, E, G, H, I, L, M, N, Q, R, S, T and V;

[0029] X₂₆ is selected from K and S;

[0030] X₂₈ is selected from I, L, N and R; and

[0031] X₂₉ is selected from D and R;
[0032] and
[0033] ii) an amino acid sequence which has at least 89% identity to the sequence defined in i).

[0034] The above definition of a class of sequence related, IL-17A binding polypeptides is based on a statistical analysis of a number of random polypeptide variants of a parent scaffold, that were selected for their interaction with IL-17A in several different selection experiments. The identified IL-17A binding motif, or “BM”, corresponds to the target binding region of the parent scaffold, which region constitutes two alpha helices within a three-helical bundle protein domain. In the parent scaffold, the varied amino acid residues of the two BM helices constitute a binding surface for interaction with the constant Fc part of antibodies. In the present disclosure, the random variation of binding surface residues and subsequent selection of variants have replaced the Fc interaction capacity with a capacity for interaction with IL-17A.

[0035] As the skilled person will realize, the function of any polypeptide, such as the IL-17A binding capacity of the polypeptide of the present disclosure, is dependent on the tertiary structure of the polypeptide. It is therefore possible to make minor changes to the sequence of amino acids in a polypeptide without affecting the function thereof. Thus, the disclosure encompasses modified variants of the IL-17A binding polypeptide, which are such that the IL-17A binding characteristics are retained.

[0036] In this way, also encompassed by the present disclosure is an IL-17A binding polypeptide comprising an amino acid sequence with 89% or greater identity to a polypeptide as defined in i). In some embodiments, the polypeptide may comprise a sequence which is at least 93%, such as at least 96% identical to a polypeptide as defined in i). For example, it is possible that an amino acid residue belonging to a certain functional grouping of amino acid residues (e.g. hydrophobic, hydrophilic, polar etc) could be exchanged for another amino acid residue from the same functional group.

[0037] In some embodiments, such changes may be made in any position of the sequence of the IL-17A binding polypeptide as disclosed herein. In other embodiments, such changes may be made only in the non-variable positions, also denoted scaffold amino acid residues. In such cases, changes are not allowed in the variable positions, i.e. positions denoted with an “X” in sequence i).

[0038] The term “% identity”, as used throughout the specification, may for example be calculated as follows. The query sequence is aligned to the target sequence using the CLUSTAL W algorithm (Thompson et al, Nucleic Acids Research, 22: 4673-4680 (1994)). A comparison is made over the window corresponding to the shortest of the aligned sequences. The shortest of the aligned sequences may in some instances be the target sequence. In other instances, the query sequence may constitute the shortest of the aligned sequences. The amino acid residues at each position are compared and the percentage of positions in the query sequence that have identical correspondences in the target sequence is reported as % identity.

[0039] In one particular embodiment according to the first aspect, there is provided a polypeptide as defined above, wherein, in sequence i),

[0040] X₂ is selected from A, H and M;

[0041] X₄ is selected from A, D, E, F, L, M, N, Q, R and Y;

[0042] X₁₁ is selected from A, D, E, F, G, L, M, N, S, T and Y;

[0043] X₁₈ is selected from A, D, E and V;

[0044] X₂₀ is selected from A, G, Q and W;

[0045] X₂₁ is selected from E, F, H, N, R, T, V, W and Y;

[0046] X₂₅ is selected from A, D, E, G, H, I, L, N, Q, R, S, T and V; and

[0047] X₂₈ is selected from I, N and R.

[0048] In another particular embodiment according to the first aspect, there is provided a polypeptide as defined in the paragraph immediately above, wherein in addition, in sequence i),

[0049] X₁₆ is T;

[0050] X₁₇ is W;

[0051] X₂₁ is selected from E, F, H, W, T and Y;

[0052] X₂₅ is selected from A, D, E, G, H, I, L, N, Q, R, S and T;

[0053] X₂₆ is K; and

[0054] X₂₉ is D.

[0055] “Xₙ” and “Xₘ” are used herein to indicate amino acids in positions n and m in the sequence i) as defined above, wherein n and m are integers indicating the position of an amino acid within sequence i) as counted from the N terminus. For example, X₃ and X₇ indicate the amino acids in positions three and seven, respectively, from the N-terminal end of sequence i).

[0056] In embodiments according to the first aspect, there are provided polypeptides wherein Xₙ in sequence i) is independently selected from a group of possible residues as listed in Table 1. The skilled person will appreciate that Xₙ may be selected from any one of the listed groups of possible residues and that this selection is independent from the selection of amino acids in Xₘ, wherein n≠m. Thus, any of the listed possible residues in position Xₙ in Table 1 may be independently combined with any of the listed possible residues any other variable position in Table 1.

[0057] The skilled person will appreciate that Table 1 is to be read as follows: In one embodiment according to the first aspect, there is provided a polypeptide wherein amino acid residue “Xₙ” in sequence i) is selected from “Possible residues”. Thus, Table 1 discloses several specific and individualized embodiments of the first aspect of the present disclosure. For example, in one embodiment according to the first aspect, there is provided a polypeptide wherein X₄ in sequence i) is selected from A, D, E, F, L, N, Q, R and Y, and in another embodiment according to the first aspect, there is provided a polypeptide wherein X₄ in sequence i) is selected from D, E, N and Y. For avoidance of doubt, the listed embodiments may be freely combined in yet other embodiments. For example, one such combined embodiment is a polypeptide in which X₄ is selected from D, E, F, N, Q, R and Y, while X₇ is selected from F, V and W, and X₁₈ is selected from A, D, E and H, and so on.

TABLE 1

| Xₙ | Possible residues |
|---|---|
| X₂ | A, M, Y |
| X₂ | A, M |
| X₂ | A |
| X₄ | A, D, E, F, K, L, M, N, Q, R, Y |
| X₄ | A, D, E, F, L, M, N, Q, R, S, Y |
| X₄ | A, D, E, F, L, M, N, Q, R, Y |
| X₄ | A, D, E, F, L, N, Q, R, Y |
| X₄ | A, D, E, F, M, N, Q, Y |
| X₄ | A, D, E, F, L, Q, R |
| X₄ | A, D, E, L, Q, R |
| X₄ | A, D, Q, R |
| X₄ | D, Q |
| X₄ | A, D, E, F, N, Q, Y |
| X₄ | D, E, F, N, Q, R, Y |
| X₄ | D, E, N, Q, Y |
| X₄ | D, E, N, Y |
| X₄ | D, E, Q, Y |
| X₄ | D, E, Y |
| X₄ | D, E |
| X₄ | D |
| X₄ | Q |
| X₆ | A, Q |
| X₆ | A, W |
| X₆ | Q, W |
| X₆ | W |
| X₆ | A |
| X₆ | Q |
| X₇ | F, I, L, V, W, Y |
| X₇ | F, I, L, V, Y |
| X₇ | I, L, V, Y |
| X₇ | L, V, Y |
| X₇ | L, V |
| X₇ | F, M, V, W, Y |
| X₇ | F, V, W, Y |
| X₇ | F, V, W |
| X₇ | F, V |
| X₇ | V |
| X₇ | L |
| X₇ | Y |
| X₁₀ | A |
| X₁₀ | W |
| X₁₁ | A, D, E, F, G, L, M, N, S, T, Y |
| X₁₁ | A, D, E, F, L, M, S, T |
| X₁₁ | A, D, E, F, G, L, M, N, S, Y |
| X₁₁ | A, D, E, F, G, S, Y |
| X₁₁ | A, D, E, F, L, M, S |
| X₁₁ | A, D, E, L, M, S |
| X₁₁ | A, D, E, L, S |
| X₁₁ | A, D, E, L, M |
| X₁₁ | A, D, E, L |
| X₁₁ | D, E, L |
| X₁₁ | D, L |
| X₁₁ | A, D, E, F, S, Y |
| X₁₁ | A, D, E, S |
| X₁₁ | A, D, S |
| X₁₁ | A, S |
| X₁₁ | A, D |
| X₁₁ | D, S |
| X₁₁ | L |
| X₁₁ | D |
| X₁₁ | S |
| X₁₁ | A |
| X₁₁ | E |
| X₁₆ | T |
| X₁₆ | N |
| X₁₇ | H, W |
| X₁₇ | Y, W |
| X₁₇ | H, Y |
| X₁₇ | W |
| X₁₇ | H |
| X₁₇ | Y |
| X₁₈ | A, D, E, V |
| X₁₈ | A, D, E, H |
| X₁₈ | A, D, H |
| X₁₈ | A, D, E |
| X₁₈ | A, D |
| X₁₈ | D, E |
| X₁₈ | D |
| X₁₈ | A |
| X₂₀ | A, G, Q, W |
| X₂₀ | A, Q, S, W |
| X₂₀ | A, Q, W |
| X₂₀ | G, Q, W |
| X₂₀ | G, W |
| X₂₀ | Q, W |
| X₂₀ | A, W |
| X₂₀ | W |
| X₂₀ | A |
| X₂₀ | Q |
| X₂₁ | A, D, E, F, H, N, R, T, V, W, Y |
| X₂₁ | A, D, E, F, H, N, R, V, W, Y |
| X₂₁ | E, F, H, N, R, V, W, Y |
| X₂₁ | F, H, N, R, V, W, Y |
| X₂₁ | E, F, H, T, W, Y |
| X₂₁ | E, F, H, W, Y |
| X₂₁ | F, H, R, W, Y |
| X₂₁ | F, H, W, Y |
| X₂₁ | F, W, Y |
| X₂₁ | W, Y |
| X₂₁ | F, Y |
| X₂₁ | F, W |
| X₂₁ | Y |
| X₂₁ | W |
| X₂₁ | F |
| X₂₅ | A, D, E, G, H, I, L, N, Q, R, S, T, V |
| X₂₅ | A, D, E, G, H, I, L, N, Q, R, S, T |
| X₂₅ | A, D, E, G, H, N, Q, R, S, T, V |
| X₂₅ | D, E, G, N, Q, R, S, T, V |
| X₂₅ | D, E, N, Q, R, V |
| X₂₅ | A, D, E, G, I, L, N, Q, R, S, T |
| X₂₅ | D, E, G, N, Q, R, S |
| X₂₅ | D, E, N, Q, R, S |
| X₂₅ | A, E, G, L, N, Q, R, S, T |
| X₂₅ | E, N, Q, R, S |
| X₂₅ | E, N, Q, S, T |
| X₂₅ | E, N, Q, S |
| X₂₅ | N, Q, R |
| X₂₅ | E, Q, R |
| X₂₅ | Q, R, S |
| X₂₅ | Q, S |
| X₂₅ | Q, R |
| X₂₅ | Q |
| X₂₅ | S |
| X₂₅ | N |
| X₂₅ | E |
| X₂₆ | K |
| X₂₆ | S |
| X₂₈ | I, N, R |
| X₂₈ | I, L, R |
| X₂₈ | I, R |
| X₂₈ | N, R |
| X₂₈ | I, N |
| X₂₈ | R |
| X₂₈ | I |
| X₂₈ | N |
| X₂₉ | D |
| X₂₉ | R |

[0058] In a more specific embodiment defining a sub-class of IL-17A binding polypeptides, sequence i) fulfills at least six of the eleven conditions I-XI:
[0059] I. X₂ is A;
[0060] II. X₄ is selected from D, E and Q;
[0061] III. X₆ is A;
[0062] IV. X₇ is selected from F and V;
[0063] V. X₁₆ is T;
[0064] VI. X₁₇ is W;
[0065] VII. X₁₈ is selected from A and D;
[0066] VIII. X₂₀ is W;
[0067] IX. X₂₆ is K;
[0068] X. X₂₈ is R; and
[0069] XI. X₂₉ is D.

[0070] In some examples of an IL-17A binding polypeptide according to the first aspect, sequence i) fulfills at least seven of the eleven conditions I-XI. More specifically, sequence i) may fulfill at least eight of the eleven conditions I-XI, such as at least nine of the eleven conditions I-XI, such as at least ten of the eleven conditions I-XI, such as all of the eleven conditions I-XI.

[0071] In some embodiments of an IL-17A binding polypeptide according to the first aspect, X₂X₆, X₂X₁₀ or X₆X₁₀ is AA. In some embodiments, X₂X₁₇, X₂X₂₀, X₆X₁₇, X₆X₂₀, X₁₀X₁₇ or X₁₀X₂₀ is AW. In some embodiments, X₂X₂₈, X₆X₂₈ or X₁₀X₂₈ is AR. In some embodiments, X₁₇X₂₈ or X₂₀X₂₈ is WR. In some embodiments, X₁₇X₂₀ is WW.

[0072] As described in detail in the experimental section to follow, the selection of IL-17A binding polypeptide variants has led to the identification of a number of individual IL-17A binding motif (BM) sequences. These sequences constitute individual embodiments of sequence i) according to this aspect. The sequences of individual IL-17A binding motifs correspond to amino acid positions 8-36 in SEQ ID NO:1-1216 presented in FIG. 1. Hence, in one embodiment of the IL-17A binding polypeptide according to this aspect, sequence i) corresponds to the sequence from position 8 to position 36 in a sequence selected from the group consisting of SEQ ID NO:1-1216. In one embodiment, sequence i) corresponds to the sequence from position 8 to position 36 in a sequence selected from the group consisting of SEQ ID NO:1-66, 1200, 1206 and 1214. In one embodiment, sequence i) corresponds to the sequence from position 8 to position 36 in a sequence selected from the group consisting of SEQ ID NO:1-66. In one embodiment, sequence i) corresponds to the sequence from position 8 to position 36 in a sequence selected from the group consisting of SEQ ID NO:1-35. In one embodiment, sequence i) corresponds to the sequence from position 8 to position 36 in a sequence selected from the group consisting of SEQ ID NO:1-27. In one embodiment, sequence i) corresponds to the sequence from position 8 to position 36 in a sequence selected from the group consisting of SEQ ID NO:1-10. In one embodiment, sequence i) corresponds to the sequence from position 8 to position 36 in a sequence selected from the group consisting of SEQ ID NO:1-7. In one embodiment, sequence i) corresponds to the sequence from position 8 to position 36 in a sequence selected from the group consisting of SEQ ID NO:1-4. In one embodiment, sequence i) corresponds to the sequence from position 8 to position 36 in SEQ ID NO:1.

[0073] In some embodiments of the present disclosure, the BM as defined above “forms part of” a three-helix bundle protein domain. This is understood to mean that the sequence of the BM is “inserted” into or “grafted” onto the sequence of the original three-helix bundle domain, such that the BM replaces a similar structural motif in the original domain. For example, without wishing to be bound by theory, the BM is thought to constitute two of the three helices of a three-helix bundle, and can therefore replace such a two-helix motif within any three-helix bundle. As the skilled person will realize, the replacement of two helices of the three-helix bundle domain by the two BM helices has to be performed so as not to affect the basic structure of the polypeptide. That is, the overall folding of the Cα backbone of the polypeptide according to this embodiment of the invention is substantially the same as that of the three-helix bundle protein domain of which it forms a part, e.g. having the same elements of secondary structure in the same order etc. Thus, a BM according to the disclosure “forms part” of a three-helix bundle domain if the polypeptide according to this embodiment of the aspect has the same fold as the original domain, implying that the basic structural properties are shared, those properties e.g. resulting in similar CD spectra. The skilled person is aware of other parameters that are relevant.

[0074] In particular embodiments, the IL-17A binding motif (BM) thus forms part of a three-helix bundle protein domain. For example, the BM may essentially constitute two alpha helices with an interconnecting loop, within said three-helix bundle protein domain. In particular embodiments, said three-helix bundle protein domain is selected from domains of bacterial receptor proteins. Non-limiting examples of such domains are the five different three-helical domains of Protein A from Staphylococcus aureus, such as domain B, and derivatives thereof. In some embodiments, the three-helical bundle protein domain is a variant of protein Z, which is derived from domain B of staphylococcal Protein A.

[0075] In some embodiments where the IL-17A binding polypeptide as disclosed herein forms part of a three-helix bundle protein domain, the IL-17A binding polypeptide may comprise an amino acid sequence binding module (BMod) selected from:
[0076] iii) K-[BM]-DPSQS XₐX_{b}LLX_{c} EAKKL X_{d}XₑX_{f}Q;
   [0077] wherein
   [0078] [BM] is an IL-17A binding motif as defined herein, provided that X₂₉ is D;
   [0079] Xₐ is selected from A and S;
   [0080] X_{b} is selected from N and E;
   [0081] X_{c} is selected from A, S and C;
   [0082] X_{d} is selected from E, N and S;
   [0083] Xₑ is selected from D, E and S;
   [0084] X_{f} is selected from A and S; and
[0085] iv) an amino acid sequence which has at least 85% identity to a sequence defined by iii).

[0086] It may be beneficial in some embodiments that said polypeptides exhibit high structural stability, such as resistance to chemical modifications, changes in physical conditions and proteolysis, during production or storage, as well as in vivo. Thus, in other embodiments where the IL-17A binding polypeptide as disclosed herein forms part of a three-helix bundle protein domain, the IL-17A binding polypeptide may comprise an amino acid sequence binding module (BMod) selected from:
[0087] v) K-[BM]-QPEQS XₐX_{b}LLX_{c} EAKKL X_{d}XₑX_{f}Q,
   [0088] wherein
   [0089] [BM] is an IL-17A binding motif as defined herein, provided that X₂₉ is R;
   [0090] Xₐ is selected from A and S;
   [0091] X_{b} is selected from N and E;
   [0092] X_{c} is selected from A, S and C;
   [0093] X_{d} is selected from E, N and S;
   [0094] Xₑ is selected from D, E and S;
   [0095] X_{f} is selected from A and S; and
[0096] vi) an amino acid sequence which has at least 85% identity to a sequence defined by v).

[0097] As discussed above, polypeptides comprising minor changes as compared to the above amino acid sequences, which changes do not largely affect the tertiary structure or function of the polypeptide, are also within the scope of the present disclosure. Thus, in some embodiments, sequence iv and vi) have at least at least 87%, such as at least 89%, such as at least 91%, such as at least 93%, such as at least 95%, such as at least 97% identity to a sequence defined by iii) or v), respectively.

[0098] In one embodiment, Xₐ in sequence iii) or v) is A.

[0099] In one embodiment, Xₐ in sequence iii) or v) is S.

[0100] In one embodiment, X_{b} in sequence iii) or v) is N.

[0101] In one embodiment, X_{b} in sequence iii) or v) is E.

[0102] In one embodiment, X_{c} in sequence iii) or v) is A.

[0103] In one embodiment, X_{c} in sequence iii) or v) is S.

[0104] In one embodiment, X_{c} in sequence iii) or v) is C.

[0105] In one embodiment, X_{d} in sequence iii) or v) is E.

[0106] In one embodiment, X_{d} in sequence iii) or v) is N.

[0107] In one embodiment, X_{d} in sequence iii) or v) is S.

[0108] In one embodiment, Xₑ in sequence iii) or v) is D.

[0109] In one embodiment, Xₑ in sequence iii) or v) is E.

[0110] In one embodiment, Xₑ in sequence iii) or v) is S.

[0111] In one embodiment, X_{d}Xₑ in sequence iii) or v) is selected from EE, ES, SD, SE and SS.

[0112] In one embodiment, X_{d}Xₑ in sequence iii) or v) is ES.

[0113] In one embodiment, X_{d}Xₑ in sequence iii) or v) is SE.

[0114] In one embodiment, X_{d}Xₑ in sequence iii) or v) is SD.

[0115] In one embodiment, X_{f} in sequence iii) or v) is A.

[0116] In one embodiment, X_{f} in sequence iii) or v) is S.

[0117] In one embodiment, in sequence iii) or v), Xₐ is A; X_{b} is N; X_{c} is A and X_{f} is A.

[0118] In one embodiment, in sequence iii) or v), Xₐ is S; X_{b} is E; X_{c} is A and X_{f} is A.

[0119] In one embodiment, in sequence iii) or v), Xₐ is A; X_{b} is N; X_{c} is C and X_{f} is A.

[0120] In one embodiment, in sequence iii) or v), Xₐ is S; X_{b} is E; X_{c} is S and X_{f} is S.

[0121] In one embodiment, in sequence iii) or v), Xₐ is S; X_{b} is E; X_{c} is S and X_{f} is A.

[0122] In one embodiment, in sequence iii) or v), Xₐ is S; X_{b} is E; X_{c} is A and X_{f} is S.

[0123] In one embodiment, in sequence iii) or v), Xₐ is S; X_{b} is E; X_{c} is C and X_{f} is S.

[0124] In one embodiment, in sequence iii) or v), Xₐ is A; X_{b} is N; X_{c} is A; X_{d}Xₑ is ND and X_{f} is A.

[0125] In one embodiment, in sequence iii) or v), Xₐ is S; X_{b} is E; X_{c} is A; X_{d}Xₑ is ND and X_{f} is A.

[0126] In one embodiment, in sequence iii) or v), Xₐ is A; X_{b} is N; X_{c} is C; X_{d}Xₑ is ND and X_{f} is A.

[0127] In one embodiment, in sequence iii) or v), Xₐ is S; X_{b} is E; X_{c} is S; X_{d}Xₑ is ND and X_{f} is S.

[0128] In one embodiment, in sequence iii) or v), Xₐ is S; X_{b} is E; X_{c} is S; X_{d}Xₑ is ND and X_{f} is A.

[0129] In one embodiment, in sequence iii) or v), Xₐ is S; X_{b} is E; X_{c} is C; X_{d}Xₑ is ND and X_{f} is S.

[0130] In one embodiment, in sequence iii) or v), Xₐ is A; X_{b} is N; X_{c} is A; X_{d}Xₑ is SE and X_{f} is A.

[0131] In one embodiment, in sequence iii) or v), Xₐ is S; X_{b} is E; X_{c} is A; X_{d}Xₑ is SE and X_{f} is A.

[0132] In one embodiment, in sequence iii) or v), Xₐ is A; X_{b} is N; X_{c} is C; X_{d}Xₑ is SE and X_{f} is A.

[0133] In one embodiment, in sequence iii) or v), Xₐ is S; X_{b} is E; X_{c} is S; X_{d}Xₑ is SE and X_{f} is S.

[0134] In one embodiment, in sequence iii) or v), Xₐ is S; X_{b} is E; X_{c} is A; X_{d}Xₑ is SE and X_{f} is S.

[0135] In one embodiment, in sequence iii) or v), Xₐ is S; X_{b} is E; X_{c} is C; X_{d}Xₑ is SE and X_{f} is S.

[0136] In one embodiment, in sequence iii) or v), Xₐ is A; X_{b} is N; X_{c} is A; X_{d}Xₑ is ES and X_{f} is A.

[0137] In one embodiment, in sequence iii) or v), Xₐ is S; X_{b} is E; X_{c} is A; X_{d}Xₑ is ES and X_{f} is A.

[0138] In one embodiment, in sequence iii) or v), Xₐ is A; X_{b} is N; X_{c} is C; X_{d}Xₑ is ES and X_{f} is A.

[0139] In one embodiment, in sequence iii) or v), Xₐ is S; X_{b} is E; X_{c} is S; X_{d}Xₑ is ES and X_{f} is S.

[0140] In one embodiment, in sequence iii) or v), Xₐ is S; X_{b} is E; X_{c} is C; X_{d}Xₑ is ES and X_{f} is S.

[0141] In one embodiment, in sequence iii) or v), Xₐ is A; X_{b} is N; X_{c} is A; X_{d}Xₑ is SD and X_{f} is A.

[0142] In one embodiment, in sequence iii) or v), Xₐ is S; X_{b} is E; X_{c} is A; X_{d}Xₑ is SD and X_{f} is A.

[0143] In one embodiment, in sequence iii) or v), Xₐ is A; X_{b} is N; X_{c} is C; X_{d}Xₑ is SD and X_{f} is A.

[0144] In one embodiment, in sequence iii) or v), Xₐ is S; X_{b} is E; X_{c} is S; X_{d}Xₑ is SD and X_{f} is S.

[0145] In one embodiment, in sequence iii) or v), Xₐ is S; X_{b} is E; X_{c} is A; X_{d}Xₑ is SD and X_{f} is S.

[0146] In one embodiment, in sequence iii) or v), Xₐ is S; X_{b} is E; X_{c} is C; X_{d}Xₑ is SD and X_{f} is S.

[0147] In yet a further embodiment, sequence iii) corresponds to the sequence from position 7 to position 55 in a sequence selected from the group consisting of SEQ ID NO:1-1216. In one embodiment, sequence iii) corresponds to the sequence from position 7 to position 55 in a sequence selected from the group consisting of SEQ ID NO:1-66, 1200, 1206 and 1214. In one embodiment, sequence iii) corresponds to the sequence from position 7 to position 55 in a sequence selected from the group consisting of SEQ ID NO:1-66. In one embodiment, sequence iii) corresponds to the sequence from position 7 to position 55 in a sequence selected from the group consisting of SEQ ID NO:1-35. In another embodiment, sequence iii) corresponds to the sequence from position 7 to position 55 in a sequence selected from the group consisting of SEQ ID NO:1-27. In one embodiment, sequence iii) corresponds to the sequence from position 7 to position 55 in a sequence selected from the group consisting of SEQ ID NO:1-10. In yet another embodiment, sequence iii) corresponds to the sequence from position 7 to position 55 in a sequence selected from the group consisting of SEQ ID NO:1-7. In one embodiment, sequence iii) corresponds to the sequence from position 7 to position 55 in a sequence selected from the group consisting of SEQ ID NO:1-4 and in another embodiment, sequence iii) corresponds to the sequence from position 7 to position 55 in SEQ ID NO:1.

[0148] Also, in a further embodiment, there is provided an IL-17A binding polypeptide, which comprises an amino acid sequence selected from:
[0149] vii) YA-[BMod]-AP;
[0150] wherein [BMod] is an IL-17A binding module as defined above; and
[0151] viii) an amino acid sequence which has at least 86% identity to a sequence defined by vii).

[0152] In an alternative further embodiment, there is provided an IL-17A binding polypeptide, which comprises an amino acid sequence selected from:
[0153] ix) FA-[BMod]-AP;
[0154] wherein [BMod] is an IL-17A binding module as defined above; and
[0155] x) an amino acid sequence which has at least 86% identity to a sequence defined by ix).

[0156] Alternatively, there is provided an IL-17A binding polypeptide, which comprises an amino acid sequence selected from:
[0157] xi) FN-[BMod]-AP;
[0158] wherein [BMod] is an IL-17A binding module as defined above; and
[0159] xii) an amino acid sequence which has at least 86% identity to a sequence defined by xi).

[0160] As discussed above, polypeptides comprising minor changes as compared to the above amino acid sequences without largely affecting the tertiary structure and the function thereof also fall within the scope of the present disclosure. Thus, in some embodiments, the IL-17A binding polypeptides as defined above may for example have a sequence which is at least 88%, such as at least 90%, such as at least 92%, such as at least 94%, such as at least 96%, such as at least 98% identical to a sequence defined by vii), ix) or xi).

[0161] In some embodiments, the IL-17A binding motif may form part of a polypeptide comprising an amino acid sequence selected from

| SEQ | |
|---|---|
| ID NO: | |
| 1250 | ADNNFNK-[BM]-DPSQSANLLSEAKKLNESQAPK; |
| 1251 | ADNKFNK-[BM]-DPSQSANLLAEAKKLNDAQAPK; |
| 1252 | ADNKFNK-[BM]-DPSVSKEILAEAKKLNDAQAPK; |
| 1253 | ADAQQNNFNK-[BM]-DPSQSTNVLGEAKKLNESQAPK; |
| 1254 | AQHDE-[BM]-DPSQSANVLGEAQKLNDSQAPK; |
| 1255 | VDNKFNK-[BM]-DPSQSANLLAEAKKLNDAQAPK; |
| 1256 | AEAKYAK-[BM]-DPSESSELLSEAKKLNKSQAPK; |
| 1257 | VDAKYAK-[BM]-DPSQSSELLAEAKKLNDAQAPK; |
| 1258 | VDAKYAK-[BM]-DPSQSSELLAEAKKLNDSQAPK; |
| 1259 | AEAKYAK-[BM]-DPSQSSELLSEAKKLNDSQAPK; |
| 1260 | AEAKYAK-[BM]-DPSQSSELLSEAKKLNDSQAP; |
| 1261 | AEAKYAK-[BM]-DPSQSSELLSEAKKLNDAQAPK; |
| 1262 | AEAKYAK-[BM]-DPSQSSELLSEAKKLNDAQAP; |
| 1263 | AEAKFAK-[BM]-DPSQSSELLSEAKKLNDSQAPK; |
| 1264 | AEAKFAK-[BM]-DPSQSSELLSEAKKLNDSQAP; |
| 1265 | AEAKYAK-[BM]-DPSQSSELLAEAKKLNDAQAPK; |
| 1266 | AEAKYAK-[BM]-DPSQSSELLSEAKKLSESQAPK; |
| 1267 | AEAKYAK-[BM]-DPSQSSELLSEAKKLSESQAP; |
| 1268 | AEAKFAK-[BM]-DPSQSSELLSEAKKLSESQAPK; |
| 1269 | AEAKFAK-[BM]-DPSQSSELLSEAKKLSESQAP; |
| 1270 | AEAKYAK-[BM]-DPSQSSELLAEAKKLSEAQAPK; |
| 1271 | AEAKYAK-[BM]-QPEQSSELLSEAKKLSESQAPK; |
| 1272 | AEAKYAK-[BM]-DPSQSSELLSEAKKLESSQAPK; |
| 1273 | AEAKYAK-[BM]-DPSQSSELLSEAKKLESSQAP; |
| 1274 | AEAKYAK-[BM]-DPSQSSELLAEAKKLESAQAPK; |
| 1275 | AEAKYAK-[BM]-QPEQSSELLSEAKKLESSQAPK; |
| 1276 | AEAKYAK-[BM]-DPSQSSELLSEAKKLSDSQAPK; |
| 1277 | AEAKYAK-[BM]-DPSQSSELLSEAKKLSDSQAP; |
| 1278 | AEAKYAK-[BM]-DPSQSSELLAEAKKLSDSQAPK; |
| 1279 | AEAKYAK-[BM]-DPSQSSELLAEAKKLSDAQAPK; |
| 1280 | AEAKYAK-[BM]-QPEQSSELLSEAKKLSDSQAPK; |
| 1281 | VDAKYAK-[BM]-DPSQSSELLSEAKKLNDSQAPK; |
| 1282 | VDAKYAK-[BM]-DPSQSSELLSEAKKLSESQAPK; |
| 1283 | VDAKYAK-[BM]-DPSQSSELLAEAKKLSEAQAPK; |
| 1284 | VDAKYAK-[BM]-QPEQSSELLSEAKKLSESQAPK; |
| 1285 | VDAKYAK-[BM]-DPSQSSELLSEAKKLESSQAPK; |
| 1286 | VDAKYAK-[BM]-DPSQSSELLAEAKKLESAQAPK; |
| 1287 | VDAKYAK-[BM]-QPEQSSELLSEAKKLESSQAPK; |
| 1288 | VDAKYAK-[BM]-DPSQSSELLSEAKKLSDSQAPK; |
| 1289 | VDAKYAK-[BM]-DPSQSSELLAEAKKLSDSQAPK; |
| 1290 | VDAKYAK-[BM]-DPSQSSELLAEAKKLSDAQAPK; |
| 1291 | VDAKYAK-[BM]-QPEQSSELLSEAKKLSDSQAPK; |
| 1292 | VDAKYAK-[BM]-DPSQSSELLAEAKKLNKAQAPK; |
| 1293 | AEAKYAK-[BM]-DPSQSSELLAEAKKLNKAQAPK; and |
| 1294 | ADAKYAK-[BM]-DPSQSSELLSEAKKLNDSQAPK; |

wherein [BM] is an IL-17A binding motif as defined above.

[0162] In one embodiment, the IL-17A binding polypeptide comprises an amino acid sequence selected from:

| | |
|---|---|
| xiii) | VDAKYAK-[BM]-DPSQSSELLSEAKKLNDSQAPK; |

[0163] wherein [BM] is an IL-17A binding motif as defined above; and
[0164] xiv) an amino acid sequence which has at least 86% identity to the sequence defined in xiii).

[0165] Again, polypeptides comprising minor changes as compared to the above amino acid sequences without largely affecting the tertiary structure and the function thereof are also within the scope of the present disclosure. Thus, in some embodiments, the IL-17A binding polypeptides as defined above may for example have a sequence which is at least 87%, such as at least 89%, such as at least 91%, such as at least 93%, such as at least 94%, such as at least 96%, such as at least 98% identical to the sequence defined by xiii).

[0166] Sequence xiii) in such a polypeptide may be selected from the group consisting of SEQ ID NO:1-1216. In one embodiment, sequence xiii) is selected from the group consisting of SEQ ID NO:1-66, 1200, 1206 and 1214. In one embodiment, sequence xiii) is selected from the group consisting of SEQ ID NO:1-66. In one embodiment, sequence xiii) is selected from the group consisting of SEQ ID NO:1-35. In another embodiment, sequence xiii) is selected from the group consisting of SEQ ID NO:1-27. In one embodiment, sequence xiii) is selected from the group consisting of SEQ ID NO:1-10. In one embodiment, sequence xiii) is selected from SEQ ID NO:1-7. In one embodiment, sequence xiii) is selected from the group consisting of SEQ ID NO:1-4. In one embodiment, sequence xiii) is SEQ ID NO:1.

[0167] In one embodiment, the IL-17A binding polypeptide comprises an amino acid sequence selected from:

| | |
|---|---|
| xv) | AEAKYAK-[BM]DPSQSSELLSEAKKLNDSQAPK; |

[0168] wherein [BM] is an IL-17A binding motif as defined above; and
[0169] xvi) an amino acid sequence which has at least 86% identity to the sequence defined in xv).

[0170] Again, polypeptides comprising minor changes as compared to the above amino acid sequences without largely affecting the tertiary structure and the function thereof are also within the scope of the present disclosure. Thus, in some embodiments, the IL-17A binding polypeptides as defined above may for example have a sequence which is at least 87%, such as at least 89%, such as at least 91%, such as at least 93%, such as at least 94%, such as at least 96%, such as at least 98% identical to the sequence defined by xv).

[0171] Sequence xv) in such a polypeptide may be selected from the group consisting of SEQ ID NO:1217-1222. In one embodiment, sequence xv) is selected from the group consisting of SEQ ID NO:1218-1222. In one embodiment, sequence xv) is selected from the group consisting of SEQ ID NO:1219-1222. In another embodiment, sequence xv) is selected from the group consisting of SEQ ID NO:1219 and SEQ ID NO:1222. In one embodiment, sequence xv) is SEQ ID NO:1219.

[0172] The small size and robustness of the IL-17A binding domains of the present disclosure confer several advantages over conventional monoclonal antibody based therapies. Such advantages include the possibility of subcutaneous (s.c.) administration at higher doses than antibodies, alternative routes of administration, flexibility in formatting for superior potency and absence of Fc-mediated side effects. The small size combined with potential for very high solubility (>100 mg/ml) and stability allows for extreme molar amounts of drug in a small volume for s.c. injections. For systemic administration, this suggests outpatient “home use” treatment using convenient small prefilled syringes or auto-injectors, with low volume and well tolerated administration of doses. In addition, the capacity for high molar concentrations in drug preparations in combination with the ability to retain functional stability in diverse formulations opens up for topical (skin, eye, lung) administration routes. Psoriasis, asthma, uveitis and dry eye syndrome are examples of indications where alternative administration routes could be especially relevant in IL-17A mediated disease.

[0173] The terms “IL-17A binding” and “binding affinity for IL-17A” as used in this specification refer to a property of a polypeptide which may be tested for example by ELISA, by use of surface plasmon resonance (SPR) technology, or by use of the Kinetic Exclusion Assay (KinExA®). For example as described in the examples below, IL-17A binding affinity may be tested in an experiment in which samples of the polypeptide are captured on antibody coated ELISA plates and biotinylated IL-17A, followed by streptavidin conjugated HRP, are added. TMB substrate is added and the absorbance at 450 nm is measured using a multi-well plate reader, such as Victor³ (Perkin Elmer). The skilled person may then interpret the results obtained by such experiments to establish at least a qualitative measure of the binding affinity of the polypeptide for IL-17A. If a quantitative measure is desired, for example to determine the EC50 value (the half maximal effective concentration) for the interaction, ELISA may also be used. The response of the polypeptides against a dilution series of biotinylated IL-17A are measured using ELISA as described above. The skilled person may then interpret the results obtained by such experiments and EC50 values may be calculated from the results using for example GraphPad Prism 5 and non-linear regression.

[0174] IL-17A binding affinity may also be tested in an experiment in which IL-17A, or a fragment thereof, is immobilized on a sensor chip of the surface plasmon resonance (SPR) instrument, and the sample containing the polypeptide to be tested is passed over the chip. Alternatively, the polypeptide to be tested is immobilized on a sensor chip of the instrument, and a sample containing IL-17A, or a fragment thereof, is passed over the chip. The skilled person may then interpret the results obtained by such experiments to establish at least a qualitative measure of the binding affinity of the polypeptide for IL-17A. If a quantitative measure is desired, for example to determine a K_{D} value for the interaction, surface plasmon resonance methods may also be used. Binding values may for example be defined in a Biacore (GE Healthcare) or ProteOn XPR 36 (Bio-Rad) instrument. IL-17A is suitably immobilized on a sensor chip of the instrument, and samples of the polypeptide whose affinity is to be determined are prepared by serial dilution and injected in random order. K_{D} values may then be calculated from the results using for example the 1:1 Langmuir binding model of the BIAevaluation 4.1 software, or other suitable software, provided by the instrument manufacturer.

[0175] Another method for determining binding affinity for IL-17A is the Kinetic Exclusion Assay (KinExA®; Sapidyne Instruments Inc, Boise, USA; Darling and Brault, 2004. Assay and Drug Dev Tech 2(6):647-657) for measurements of the equilibrium binding affinity and kinetics between unmodified molecules in solution. For affinity analysis, the equilibrium dissociation constant, K_{D}, and the rate of association, kₐ, are experimentally determined, while the rate of dissociation, k_{d}, may be calculated based on the equation k_{d}=K_{D}*kₐ.

[0176] A KinExA® K_{D} analysis requires immobilization of one interaction partner (e.g. the titrated binding partner) to a solid phase, which is then used as a probe to capture the other interaction partner (e.g. the constant binding partner) free in solution once an equilibrium is reached. For each experiment, a series of solutions with a constant concentration of one binding partner and a titration of the other binding partner are equilibrated. The solutions are then briefly exposed to the solid phase and a portion of free constant binding partner is captured and labeled with a fluorescent secondary molecule. The short contact time with the solid phase is less than the time needed for dissociation of the pre-formed complex in solution, meaning that competition between the solution and the solid phase titrated binding partner is “kinetically excluded”. Since the solid phase is only used as a probe for the free constant binding partner in each sample, the solution equilibrium is not altered during measurements. A K_{D} value is calculated from signals generated from captured free constant binding partner, which are directly proportional to the concentration of free constant binding partner in the equilibrated sample. The data may be analyzed using the KinExA® Pro software and least squares analysis to fit the optimal solutions for the K_{D} and the Active Binding site Concentration (ABC) to a curve representative of a stoichiometric relevant model, for instance a 1:1 reversible bi-molecular interaction.

[0177] Determination of binding kinetics may be done in a similar format as the equilibrium analysis, except measurements are collected “pre-equilibrium” and the binding signals are a function of time and total concentration of the titrated binding partner. There are two methods that can be used to determine the kₐ. The “direct method” holds the concentrations of titrated and constant binding partners fixed, and the solution is probed over time. The amount of the free constant binding partner in the solution will decrease as the sample moves toward equilibrium. The “inject method” holds incubation time and one partner's concentration fixed, while titrating concentrations of the other partner. As the concentration of the titrated binding partner increases, the amount of free constant binding partner will decrease as more complexes are formed.

[0178] In one embodiment, the IL-17A binding polypeptide is capable of binding to IL-17A such that the K_{D} value of the interaction is at most 1×10⁻⁶ M, such as at most 1×10⁻⁷ M, such as at most 1×10⁻⁸ M, such as at most 1×10⁻⁹ M.

[0179] In one embodiment, an IL-17A binding polypeptide according to any aspect disclosed herein is capable of binding to an IL-17A molecule selected from the group consisting of human IL-17A and murine IL-17A. In one embodiment, the IL-17A binding polypeptide is capable of binding to human IL-17A. In one embodiment, the IL-17A binding polypeptide is capable of binding to murine IL-17A. In one embodiment, the IL-17A binding polypeptide is capable of binding to human IL-17A and to murine IL-17A. In this regard, human IL-17A may comprise the amino acid sequence SEQ ID NO:1226, or an antigenically effective fragment thereof. Likewise, murine IL-17A may comprise the amino acid sequence SEQ ID NO:1227, or an antigenically effective fragment thereof.

[0180] The skilled person will understand that various modifications and/or additions can be made to an IL-17A binding polypeptide according to any aspect disclosed herein in order to tailor the polypeptide to a specific application without departing from the scope of the present disclosure.

[0181] For example, in one embodiment, there is provided an IL-17A binding polypeptide as described herein, which polypeptide has been extended by and/or comprises additional amino acids at the C terminus and/or N terminus. Such a polypeptide should be understood as a polypeptide having one or more additional amino acid residues at the very first and/or the very last position in the polypeptide chain, i.e. at the N- and/or C-terminus of sequence i) or ii). Thus, an IL-17A binding polypeptide may comprise any suitable number of additional amino acid residues, for example at least one additional amino acid residue. Each additional amino acid residue may individually or collectively be added in order to, for example, improve and/or simplify production, purification, stabilization in vivo or in vitro, coupling or detection of the polypeptide. Such additional amino acid residues may comprise one or more amino acid residues added for the purpose of chemical coupling. One example of this is the addition of a cysteine residue. Additional amino acid residues may also provide a “tag” for purification or detection of the polypeptide, such as a His₆ tag, a (HisGlu)₃ tag (“HEHEHE” tag) or a “myc” (c-myc) tag or a “FLAG” tag for interaction with antibodies specific to the tag or immobilized metal affinity chromatography (IMAC) in the case of the His₆-tag.

[0182] The further amino acids as discussed above may be coupled to the IL-17A binding polypeptide by means of chemical conjugation (using known organic chemistry methods) or by any other means, such as expression of the IL-17A binding polypeptide as a fusion protein or joined in any other fashion, either directly or via a linker, for example an amino acid linker.

[0183] The further amino acids as discussed above may for example comprise one or more polypeptide domain(s). A further polypeptide domain may provide the IL-17A binding polypeptide with another function, such as for example yet another binding function, an enzymatic function, a toxic function, a fluorescent signaling function or combinations thereof.

[0184] A further polypeptide domain may moreover provide another IL-17A binding moiety with the same IL-17A binding function. Thus, in a further embodiment, there is provided an IL-17A binding polypeptide in a multimeric form. Said multimer is understood to comprise at least two IL-17A binding polypeptides as disclosed herein as monomer units, the amino acid sequences of which may be the same or different. Multimeric forms of the polypeptides may comprise a suitable number of domains, each having an IL-17A binding motif, and each forming a monomer within the multimer. These domains may have the same amino acid sequence, but alternatively, they may have different amino acid sequences. In other words, the IL-17A binding polypeptide of the invention may form homo- or heteromultimers, for example homo- or heterodimers. In one embodiment, there is provided an IL-17A binding polypeptide, wherein said monomeric units are covalently coupled together. In another embodiment, said IL-17A binding polypeptide monomer units are expressed as a fusion protein. In one embodiment, there is provided an IL-17A binding polypeptide in dimeric form.

[0185] Additionally, “heterogenic” fusion polypeptides or proteins, or conjugates, in which an IL-17A binding polypeptide described herein, or multimer thereof, constitutes a first domain, or first moiety, and the second and further moieties have other functions than binding IL-17A, are also contemplated and fall within the ambit of the present disclosure. The second and further moiety/moieties of the fusion polypeptide or conjugate in such a protein suitably have a desired biological activity.

[0186] Thus, in a second aspect of the present disclosure, there is provided a fusion protein or a conjugate, comprising a first moiety consisting of an IL-17A binding polypeptide according to the first aspect, and a second moiety consisting of a polypeptide having a desired biological activity. In another embodiment, said fusion protein or conjugate may additionally comprise further moieties, comprising desired biological activities that can be either the same or different from the biological activity of the second moiety.

[0187] Non-limiting examples of a desired biological activity comprise a therapeutic activity, a binding activity and an enzymatic activity.

[0188] In one embodiment, the second moiety having a desired biological activity is a therapeutically active polypeptide.

[0189] Non-limiting examples of therapeutically active polypeptides are biomolecules, such as molecules selected from the group consisting of human endogenous enzymes, hormones, growth factors, chemokines, cytokines and lymphokines. Non-limiting examples of contemplated cytokines are IL-2, IL-4, IL-7, IL-10, IL-11, IL-13, IL-21, IL-27, IL-35, IFNβ and TGFβ. Non-limiting examples of contemplated chemokines are SDF-1/CXCL12, BCL/BCA-1/CXCL13, CXCL16, HCC1/CCL14, TARC/CCL17, PARC/CCL18, MIP-3β/ELC/CCL19, SLC/CCL21, CCL25/TECK and CCL27/CTACK.

[0190] Non-limiting examples of binding activities are binding activities which increase the in vivo half-life of the fusion protein or conjugate. In one particular embodiment, said binding activity is an albumin binding activity which increases the in vivo half-life of the fusion protein or conjugate. In one embodiment, said albumin binding activity is provided by the albumin binding domain of streptococcal protein G or a derivative thereof. In another particular embodiment, said binding activity is an FcRn binding activity which increases the in vivo half-life of the fusion protein or conjugate.

[0191] In one embodiment, the fusion protein or conjugate of this second aspect comprises two monomers of the IL-17A binding polypeptide of the first aspect, whose amino acid sequences may be the same or different, linked by an albumin binding moiety. In a specific embodiment of this construct, the fusion protein or conjugate comprises two IL-17A binding monomers with an albumin binding moiety between them. Said albumin binding moiety may e.g. be a “GA” albumin binding domain from streptococcal protein G, such as “GA3”, or a derivative thereof as described in any one of WO2009/016043, WO2012/004384, WO2014/048977 and WO2015/091957.

[0192] In one embodiment, the format of such a fusion protein or conjugate is “Z-A-Z”, where each “Z” individually is an IL-17A binding polypeptide as described herein, and “A” is an albumin binding domain. In one embodiment, such an IL-17A binding polypeptide with the “Z-A-Z” format is capable of binding to IL-17A such that the K_{D} value of the interaction is at most 1×10⁻¹⁰ M, such as at most 1×10⁻¹¹ M, such as at most 1×10⁻¹² M, such as at most 1×10⁻¹³ M. In one embodiment, such a “Z-A-Z” polypeptide comprises an amino acid sequence selected from the group consisting of SEQ ID NO:1233-1247, for example selected from the group consisting of SEQ ID NO:1236, 1237 and 1242-1247, such as selected from the group consisting of SEQ ID NO:1236, 1244 and 1247 or the group consisting of SEQ ID NO:1237, 1244 and 1247. In an even more specific embodiment, the “Z-A-Z” polypeptide comprises an amino acid sequence selected from the group consisting of SEQ ID NO:1244 and 1245. In one embodiment, the “Z-A-Z” polypeptide comprises SEQ ID NO:1244.

[0193] In one embodiment, said binding activity is binding to an angiogenesis associated factor. Non-limiting examples of angiogenesis associated factors include fibroblast growth factor (FGF), fibroblast growth factor 1 (FGF-1), basic FGF, angiogenin 1 (Ang-1), angiogenin 2 (Ang-2), angiopoietin 1 (Angpt-1), angiopoietin 2 (Angpt-2), angiopoietin 3 (Angpt-3), angiopoietin 4 (Angpt-4), tyrosine kinase with immunoglobulin-like domains 1 (TIE-1), tyrosine kinase with immunoglobulin-like domains 2 (TIE-2), vascular endothelial growth factor receptor 1 (VEGFR-1), vascular endothelial growth factor receptor 2 (VEGFR-2), vascular endothelial growth factor receptor 3 (VEGFR-3), vascular endothelial growth factor A (VEGF-A), vascular endothelial growth factor B (VEGF-B), vascular endothelial growth factor C (VEGF-C), vascular endothelial growth factor D (VEGF-D), vascular endothelial growth factor E (VEGF-E), placental growth factor (PIGF), transforming growth factor β1 (TGF-β1), transforming growth factor β2 (TGF-β2), transforming growth factor β receptors (type I, type II and type III), matrix metalloproteinase (MMP), MET receptor tyrosine kinase (also denoted cMET and hepatocyte growth factor receptor (HGFR)), members of the Notch family of receptors and beta-catenin.

[0194] In one embodiment, said binding activity is binding to an immune response associated factor. Non-limiting examples of immune response associated factors include

[0195] T-cell regulatory factors such as CD3, CD4, CD6, CD28, T-cell receptor α (TCRα), T-cell receptor β (TCRβ), cytotoxic T-lymphocyte-associated protein 4 (CTLA-4), and programmed cell death protein 1 (PD-1), programmed death-ligand 1 (PD-L1), programmed death-ligand 2 (PD-L2), B7 homolog 3 (B7-H3), B7 homolog 4 (B7-H4), herpes virus entry mediator (HVEM)/B- and T-lymphocyte attenuator (BTLA), killer inhibitory receptor (KIR), lymphocyte-activation gene 3 (LAG3), galectin-9 (Gal9)/T cell immunoglobulin mucin-3 (TIM3) and adenosine/alpha-2 adrenergic receptors (A2aR);

[0196] NK-cell recruitment factors such as CD16, natural killer cell lectin-like receptor gene 2D product (NKG2D), lymphocyte function-associated antigen 1 (LFA1) and the natural cytotoxicity receptors NKp30 and NKp40;

[0197] inflammation-associated factors such as
[0198] cytokines and their receptors, including tumor necrosis factors (TNF); tumor necrosis factor ligand super family (TNFSF) members TNFSF11/RANKL, TNFSF12/TWEAK, TNFSF13, TNFSF13B/BAFF/BLys, TNFSF14, TNFSF15; interleukins (IL) IL-1α, IL-1β, IL-2, IL-5, IL-6, IL-10, IL-12, IL-17B, IL-17C, IL-17D, IL-17E, IL-17F, IL-18, IL-22, IL-23, IL-26, IL-32, IL33 and IL-34; interferons INFα and INFγ; granulocyte colony-stimulating factor (GCSF), granulocyte colony-stimulating factor (GM-CSF); and
[0199] inflammatory chemokines and their receptors, including IL-8/CXCL8, ENA-78/CXCL5, GROα/CXCL1, CTAP-III/CXCL7, IP-10/CXCL10, Mig/CXCL9, PF4/CXCL4, GCP-2/CXCL6, MCP-1/CCL2, MIP-1α/CCL3, MIP-3α/CCL20, RANTES/CCL5, lymphotactin/XCL1 and fractalkine/CX3CL1.

[0200] In particularly selected embodiments, the binding activity of said second moiety is binding to a target selected from the group consisting of TNF, IL-1β, IL-6, IL-17F and IL-23.

[0201] In one embodiment of either the first or second aspect of the present disclosure, there is provided an IL-17A binding polypeptide, fusion protein or conjugate which comprises an immune response modifying agent. Non-limiting examples of such immune response modifying agents include immunosuppressive or immunomodulating agents or other anti-inflammatory agents. For example, an IL-17A binding polypeptide, fusion protein or conjugate as described herein may comprise an agent selected from the group consisting of disease-modifying antirheumatic drugs (DMARDs), such as gold salts, azathioprine, methotrexate and leflunomide; calcineurin inhibitors, such as cyclosporin A or FK 506; modulators of lymphocyte recirculation; mTOR inhibitors, such as rapamycin; an ascomycin having immunosuppressive properties; glucocorticoids; corticosteroids; cyclophosphamide; immunosuppressive monoclonal antibodies, for example monoclonal antibodies with affinity for leukocyte receptors such as MHC, CD2, CD3, CD4, CD7, CD8, CD25, CD28, CD40, CD45, CD58, CD80, CD86 or their ligands; adhesion molecule inhibitors, such as LFA-1 antagonists, ICAM-1 or -3 antagonists, VCAM-4 antagonists or VLA-4 antagonists; anti-TNF agents, such as etanercept and monoclonal antibodies to TNF such as infliximab and adalimumab; inhibitors of proinflammatory cytokines; IL-1 blockers such as anakinra or IL-1 trap; IL-6 blockers; chemokine inhibitors; non-steroidal anti-inflammatory drugs (NSAIDs) such as aspirin; and anti-infectious agents and other immune response modulating agents; as well as combinations of any two or more of the above.

[0202] In one embodiment of either the first or second aspect of the present disclosure, there is provided an IL-17A binding polypeptide, fusion protein or conjugate which comprises a toxic compound. Non-limiting examples of such toxic compounds include calicheamicin, maytansinoid, neocarzinostatin, esperamicin, dynemicin, kedarcidin, maduropeptin, doxorubicin, daunorubicin, auristatin, ricin-A chain, modeccin, truncated Pseudomonas exotoxin A, diphtheria toxin and recombinant gelonin.

[0203] Recently, considerable progress has been made in the development of multispecific agents, such as antibodies with the ability to bind to more than one antigen, for example through engineering of the complementarity determining regions (CDRs) to address two antigens in a single antibody combining site (Bostrom et al, 2009, Science 323(5921):1610-1614; Schaefer et al, 2011, Cancer Cell 20(4):472-486), via construction of heterodimeric antibodies using engineered Fc units (Carter, 2001, J Immunol Methods 248(1-2):7-15; Schaefer et al, 2011, Proc Natl Acad Sci USA 108(27):11187-11192) and via genetic fusion of auxiliary recognition units to N- or C-termini of light or heavy chains of full-length antibodies (Kanakaraj et al, 2012, MAbs 4(5):600-613; LaFleur et al, 2013, MAbs 5(2):208-218).

[0204] As discussed above, it may be beneficial for a polypeptide with affinity for IL-17A as disclosed herein to also exhibit affinity for another factor, such as an immune response associated factor, for example an inflammation-associated factor.

[0205] Thus, in a third aspect of the present disclosure, there is provided a complex comprising at least one IL-17A binding polypeptide as defined herein and at least one antibody or an antigen binding fragment thereof.

[0206] When used herein to denote the third aspect of the disclosure, the term “complex” is intended to refer to two or more associated polypeptide chains, one having an affinity for IL-17A by virtue of its IL-17A binding motif as defined above, and the other being an antibody or an antigen binding fragment thereof. These polypeptide chains may each contain different protein domains, as described amply above for the IL-17A binding polypeptide of the first and second aspects, and the resulting multiprotein complex can have multiple functions. “Complex” intends to refer to two or more polypeptides as defined herein, connected by covalent bonds, for example two or more polypeptide chains connected by covalent bonds through expression thereof as a recombinant fusion protein, or associated by chemical conjugation.

[0207] The third aspect provides a complex comprising an antibody or an antigen binding fragment thereof. As is well known, antibodies are immunoglobulin molecules capable of specific binding to a target (an antigen), such as a carbohydrate, polynucleotide, lipid, polypeptide or other, through at least one antigen recognition site located in the variable region of the immunoglobulin molecule. As used herein, the term “antibody or an antigen binding fragment thereof” encompasses not only full-length or intact polyclonal or monoclonal antibodies, but also antigen-binding fragments thereof, such as Fab, Fab′, F(ab′)₂, Fab₃, Fv and variants thereof, fusion proteins comprising one or more antibody portions, humanized antibodies, chimeric antibodies, minibodies, diabodies, triabodies, tetrabodies, linear antibodies, single chain antibodies, multispecific antibodies (e.g. bispecific antibodies) and any other modified configuration of the immunoglobulin molecule that comprises an antigen recognition site of the required specificity, including glycosylation variants of antibodies, amino acid sequence variants of antibodies and covalently modified antibodies. Further examples of modified antibodies and antigen binding fragments thereof include nanobodies, AlbudAbs, DARTs (dual affinity re-targeting), BiTEs (bispecific T-cell engager), TandAbs (tandem diabodies), DAFs (dual acting Fab), two-in-one antibodies, SMIPs (small modular immunopharmaceuticals), FynomAbs (fynomers fused to antibodies), DVD-Igs (dual variable domain immunoglobulin), CovX-bodies (peptide modified antibodies), duobodies and triomAbs. This listing of variants of antibodies and antigen binding fragments thereof is not to be seen as limiting, and the skilled person is aware of other suitable variants.

[0208] A full-length antibody comprises two heavy chains and two light chains. Each heavy chain contains a heavy chain variable region (V_{H}) and first, second and third constant regions (C_{H}1, C_{H}2 and C_{H}3). Each light chain contains a light chain variable region (V_{L}) and a light chain constant region (C_{L}). Depending on the amino acid sequence of the constant domain of its heavy chains, antibodies are assigned to different classes. There are six major classes of antibodies: IgA, IgD, IgE, IgG, IgM and IgY, and several of these may be further divided into subclasses (isotypes), e.g., IgG1, IgG2, IgG3, IgG4, IgA1 and IgA2. The term “full-length antibody” as used herein refers to an antibody of any class, such as IgD, IgE, IgG, IgA, IgM or IgY (or any sub-class thereof). The subunit structures and three-dimensional configurations of different classes of antibodies are well known.

[0209] An “antigen binding fragment” is a portion or region of an antibody molecule, or a derivative thereof, that retains all or a significant part of the antigen binding of the corresponding full-length antibody. An antigen binding fragment may comprise the heavy chain variable region (V_{H}), the light chain variable region (V_{L}), or both. Each of the V_{H} and V_{L} typically contains three complementarity determining regions CDR1, CDR2 and CDR3. The three CDRs in V_{H} or V_{L} are flanked by framework regions (FR1, FR2, FR3 and FR4). As briefly listed above, examples of antigen binding fragments include, but are not limited to: (1) a Fab fragment, which is a monovalent fragment having a V_{L}-C_{L} chain and a V_{H}-C_{H}1 chain; (2) a Fab′ fragment, which is a Fab fragment with the heavy chain hinge region, (3) a F(ab′)₂ fragment, which is a dimer of Fab′ fragments joined by the heavy chain hinge region, for example linked by a disulfide bridge at the hinge region; (4) an Fc fragment; (5) an Fv fragment, which is the minimum antibody fragment having the V_{L} and V_{H} domains of a single arm of an antibody; (6) a single chain Fv (scFv) fragment, which is a single polypeptide chain in which the V_{H} and V_{L} domains of an scFv are linked by a peptide linker; (7) an (scFv)₂, which comprises two V_{H} domains and two V_{L} domains, which are associated through the two V_{H} domains via disulfide bridges and (8) domain antibodies, which can be antibody single variable domain (V_{H} or V_{L}) polypeptides that specifically bind antigens.

[0210] Antigen binding fragments can be prepared via routine methods. For example, F(ab′)₂ fragments can be produced by pepsin digestion of a full-length antibody molecule, and Fab fragments can be generated by reducing the disulfide bridges of F(ab′)₂ fragments. Alternatively, fragments can be prepared via recombinant technology by expressing the heavy and light chain fragments in suitable host cells (e.g., E. coli, yeast, mammalian, plant or insect cells) and having them assembled to form the desired antigen-binding fragments either in vivo or in vitro. A single-chain antibody can be prepared via recombinant technology by linking a nucleotide sequence coding for a heavy chain variable region and a nucleotide sequence coding for a light chain variable region. For example, a flexible linker may be incorporated between the two variable regions. The skilled person is aware of methods for the preparation of both full-length antibodies and antigen binding fragments thereof.

[0211] Thus, in one embodiment, this aspect of the disclosure provides a complex as defined herein, wherein said at least one antibody or antigen binding fragment thereof is selected from the group consisting of full-length antibodies, Fab fragments, Fab′ fragments, F(ab′)₂ fragments, Fc fragments, Fv fragments, single chain Fv fragments, (scFv)₂ and domain antibodies. In one embodiment, said at least one antibody or antigen binding fragment thereof is selected from full-length antibodies, Fab fragments and scFv fragments. In one particular embodiment, said at least one antibody or antigen binding fragment thereof is a full-length antibody.

[0212] In one embodiment of said complex as defined herein, the antibody or antigen binding fragment thereof is selected from the group consisting of monoclonal antibodies, human antibodies, humanized antibodies, chimeric antibodies, and antigen-binding fragments thereof.

[0213] The term “monoclonal antibodies” as used herein refers to antibodies having monovalent affinity, meaning that each antibody molecule in a sample of the monoclonal antibody binds to the same epitope on the antigen, whereas the term “polyclonal antibodies” as used herein refers to a collection of antibodies that react against a specific antigen, but in which collection there may be different antibody molecules for example identifying different epitopes on the antigen. Polyclonal antibodies are typically produced by inoculation of a suitable mammal and are purified from the mammal's serum. Monoclonal antibodies are made by identical immune cells that are clones of a unique parent cell (for example a hybridoma cell line). The term “human antibody” as used herein refers to antibodies having variable and constant regions corresponding substantially to, or derived from, antibodies obtained from human subjects. The term “chimeric antibodies” as used herein, refers to recombinant or genetically engineered antibodies, such as for example mouse monoclonal antibodies, which contain polypeptides or domains from a different species, for example human, introduced to reduce the antibodies' immunogenicity. The term “humanized antibodies” refers to antibodies from non-human species whose protein sequences have been modified to increase their similarity to antibody variants produced naturally in humans, in order to reduce immunogenicity.

[0214] It may be beneficial for a complex as defined herein to, in addition to being capable of binding IL-17A, target at least one additional antigen, such as an antigen selected from the group consisting of an antigen associated with an angiogenesis related disorder and an antigen associated with the immune response. In one embodiment, said additional antigen is associated with angiogenesis. In one embodiment, said additional antigen is associated with the immune response.

[0215] In one embodiment, the antigen is associated with angiogenesis and is selected from the group consisting of fibroblast growth factor (FGF), fibroblast growth factor 1 (FGF-1), basic FGF, angiogenin 1 (Ang-1), angiogenin 2 (Ang-2), angiopoietin 1 (Angpt-1), angiopoietin 2 (Angpt-2), angiopoietin 3 (Angpt-3), angiopoietin 4 (Angpt-4), tyrosine kinase with immunoglobulin-like domains 1 (TIE-1), tyrosine kinase with immunoglobulin-like domains 2 (TIE-2), vascular endothelial growth factor receptor 1 (VEGFR-1), vascular endothelial growth factor receptor 2 (VEGFR-2), vascular endothelial growth factor receptor 3 (VEGFR-3), vascular endothelial growth factor A (VEGF-A), vascular endothelial growth factor B (VEGF-B), vascular endothelial growth factor C (VEGF-C), vascular endothelial growth factor D (VEGF-D), vascular endothelial growth factor E (VEGF-E), placental growth factor (PIGF), transforming growth factor β1 (TGF-β1), transforming growth factor β2 (TGF-β2), transforming growth factor 62 receptors (type I, type II and type III), matrix metalloproteinase (MMP), MET receptor tyrosine kinase (also denoted cMET and hepatocyte growth factor receptor (HGFR)), members of the Notch family of receptors and beta-catenin. In one embodiment, said antibody or fragment thereof is selected from the group consisting of AMG 780, AMG 386, MEDI-3617, nesvacumab, CVX-241, bevacizumab, ranibizumab, VGX100, CVX-241, ABP 215, PF-06439535, fresolimumab, metelimumab, onartuzumab, emibetuzumab and tarextumab.

[0216] In one embodiment, the antigen is associated with the immune response or a disorder of the immune system, and is selected from the group consisting of

[0217] T-cell regulatory factors such as CD3, CD4, CD6, CD28, T-cell receptor α (TCRα), T-cell receptor β (TCRβ), cytotoxic T-lymphocyte-associated protein 4 (CTLA-4), and programmed cell death protein 1 (PD-1), programmed death-ligand 1 (PD-L1), programmed death-ligand 2 (PD-L2), B7 homolog 3 (B7-H3), B7 homolog 4 (B7-H4), herpes virus entry mediator (HVEM)/B- and T-lymphocyte attenuator (BTLA), killer inhibitory receptor (KIR), lymphocyte-activation gene 3 (LAG3), galectin-9 (Gal9)/T cell immunoglobulin mucin-3 (TIM3) and adenosine/alpha-2 adrenergic receptors (A2aR);

[0218] NK-cell recruitment factors such as CD16, natural killer cell lectin-like receptor gene 2D product (NKG2D), lymphocyte function-associated antigen 1 (LFA1) and the natural cytotoxicity receptors NKp30 and NKp40;

[0219] inflammation-associated factors such as
[0220] cytokines and their receptors, including tumor necrosis factors (TNF); tumor necrosis factor ligand super family (TNFSF) members TNFSF11/RANKL, TNFSF12/TWEAK, TNFSF13, TNFSF13B/BAFF/BLys, TNFSF14, TNFSF15; interleukins (IL) IL-1α, IL-1β, IL-2, IL-5, IL-6, IL-10, IL-12, IL-17B, IL-17C, IL-17D, IL-17E, IL-17F, IL-18, IL-22, IL-23, IL-26, IL-32, IL33 and IL-34; interferons INFα and INFγ; granulocyte colony-stimulating factor (GCSF), granulocyte colony-stimulating factor (GM-CSF); and
[0221] inflammatory chemokines and their receptors, including IL-8/CXCL8, ENA-78/CXCL5, GROα/CXCL1, CTAP-III/CXCL7, IP-10/CXCL10, Mig/CXCL9, PF4/CXCL4, GCP-2/CXCL6, MCP-1/CCL2, MIP-1α/CCL3, MIP-3α/CCL20, RANTES/CCL5, lymphotactin/XCL1 and fractalkine/CX3CL1.

[0222] In one embodiment, the antigen is selected from the group consisting of TNF, IL-1β, IL-6, IL-17F and IL-23.

[0223] In one embodiment, said antibody or fragment thereof is selected from the group consisting of visilizumab, otelixizumab, ipilimumab, tremelimumab, pembrolizumab, nivolumab, pidilizumab, MPDL3280A, MEDI-4736, MPDL3280A and lirilumab, and antigen-binding fragments thereof.

[0224] In one particular embodiment, said antigen is TNF. In one embodiment, said antibody or fragment thereof is selected from the group consisting of adalimumab, infliximab, golimumab, certolimumab pegol, and antigen binding fragments thereof. In another embodiment said antibody or fragment thereof is a full-length antibody selected from the group consisting of adalimumab, infliximab, golimumab and certolimumab pegol. In one particular embodiment, said antibody or antigen binding fragment thereof is adalimumab or an antigen binding fragment thereof, for example full-length adalimumab.

[0225] The complex as described herein may for example be present in the form of a fusion protein or a conjugate. Thus, said at least one IL-17A binding polypeptide and said at least one antibody, or antigen binding fragment thereof, may be coupled by means of chemical conjugation (using known organic chemistry methods) or by any other means, such as expression of the complex as a fusion protein or joined in any other fashion, either directly or via a linker, for example an amino acid linker.

[0226] Thus, in one embodiment, there is provided a complex as defined herein, wherein said complex is a fusion protein or a conjugate. In one embodiment, said complex is a fusion protein. In another embodiment, said complex is a conjugate. In one embodiment of said complex, said IL-17A binding polypeptide is attached to the N-terminus or C-terminus of the heavy chain of said antibody or antigen binding fragment thereof. In another embodiment, said IL-17A binding polypeptide is attached to the N-terminus or C-terminus of the light chain of said antibody or antigen binding fragment thereof. In one embodiment, said IL-17A binding polypeptide is attached to the N-terminus and/or C-terminus of the light chain and heavy chain of said antibody or antigen binding fragment thereof. For example, the IL-17A binding polypeptide may be attached to only the N-terminus of the heavy chain(s), only the N-terminus of the light chain(s), only the C-terminus of the heavy chain(s), only the C-terminus of the light chain(s), both the N-terminus and the C-terminus of the heavy chain(s), both the N-terminus and the C-terminus of the light chain(s), only the C-terminus of the light chain(s) and the N-terminus of the heavy chain(s), only the C-terminus of the heavy chain(s) and the N-terminus of the light chain(s), of said antibody or antigen binding fragment thereof.

[0227] As the skilled person understands, the construction of a fusion protein often involves use of linkers between functional moieties to be fused. The skilled person is aware of different kinds of linkers with different properties, such as flexible amino acid linkers, rigid amino acid linkers and cleavable amino acid linkers. Linkers have been used to for example increase stability or improve folding of fusion proteins, to increase expression, improve biological activity, affinity and/or binding, enable targeting and alter pharmacokinetics of fusion proteins. Thus, in one embodiment, the IL-17A binding polypeptide, fusion protein, conjugate or complex as defined herein further comprises at least one linker. The linker may for example be selected from the group consisting of flexible amino acid linkers, rigid amino acid linkers and cleavable amino acid linkers. Alternatively, the linker may be a non-peptidic linker. In one embodiment of a fusion protein or conjugate as disclosed herein, said linker is arranged between a first moiety consisting of an IL-17A binding polypeptide as defined herein and a second moiety consisting of a polypeptide having a desired biological activity. In one embodiment of a complex as disclosed herein, said linker is arranged between said IL-17A binding polypeptide and said antibody or antigen binding fragment thereof. The skilled person will appreciate that the presence of linker arranged in any of above mentioned contexts does not exclude the presence of additional linkers in the same or any other context.

[0228] Flexible linkers are often used when the joined domains require a certain degree of movement or interaction, and may be particularly useful in some embodiments of the IL-17A binding polypeptide, fusion protein, conjugate or complex as defined herein. Such linkers are generally composed of small, non-polar (for example G) or polar (for example S or T) amino acids. Some flexible linkers primarily consist of stretches of G and S residues, for example (GGGGS)ₚ and (SSSSG)ₚ. Adjusting the copy number “p” allows for optimization of the linker in order to achieve appropriate separation between the functional moieties or to maintain necessary inter-moiety interaction. Apart from G and S linkers, other flexible linkers are known in the art, such as G and S linkers containing additional amino acid residues, such as T, A, K and E, to maintain flexibility, as well as polar amino acid residues to improve solubility.

[0229] In one embodiment, said linker is a flexible linker comprising glycine (G), serine (S) and/or threonine (T) residues. In one embodiment, said linker comprises a sequence with a general formula selected from (GₙSₘ)ₚ and (SₙGₘ)ₚ, wherein, independently, n=1-7, m=0-7, n+m≦8 and p=1-10. In one embodiment, n=1-5. In one embodiment, m=0-5. In one embodiment, p=1-5. In a more specific embodiment, n=4, m=1 and p=1-4.

[0230] In one embodiment, said linker comprises a sequence selected from the group consisting of G₄S, (G₄S)₂, (G₄S)₃ and (G₄S)₄.

[0231] In one embodiment, said linker comprises a sequence with the general formula GT(GₙSₘ)ₚ, wherein, independently, n=1-7, m=0-7, n+m≦8 and p=1-10. In one embodiment, n=1-5. In one embodiment, m=0-5. In one embodiment, p=1-5. In a more specific embodiment, n=4, m=1 and p=1-4. Thus, in one embodiment wherein n=4, said linker comprises GT(G₄S)ₚ. In one specific embodiment, n=4 and p=1, so that said linker comprises GTG₄S. In one embodiment, said linker comprises a sequence selected from the group consisting of GT(G₄S)ₚTS, GT(G₄S)ₚPR and GT(G₄S)ₚPK.

[0232] In one embodiment, said linker comprises a sequence with the general formula GAP(GₙSₘ)ₚ, wherein, independently, n=1-7, m=0-7, n+m≦8 and p=1-10. In one embodiment, n=1-5. In one embodiment, m=0-5. In one embodiment, p=1-5. In a more specific embodiment, n=4, m=1 and p=1-4. Thus, in one embodiment wherein n=4, said linker comprises GAP(G₄S)ₚ. In one specific embodiment, n=4 and p=1, so that said linker comprises GAPG₄S. In one embodiment, said linker comprises a sequence selected from the group consisting of GAP(G₄S)ₚTS, GAP(G₄S)ₚPR and GAP(G₄S)ₚPK.

[0233] In one embodiment, said linker comprises a sequence selected from the group consisting of KL(G₄S)ₚ, LQ(G₄S)ₚ and YV(G₄S)ₚPK. In one embodiment, said linker comprises a sequence selected from the group consisting of S₄G, (S₄G)₃, (S₄G)₄ and (S₄G)₈. In one embodiment, said linker comprises a sequence selected from the group consisting of VDGS, ASGS and VEGS. In a specific embodiment, said linker comprises ASGS.

[0234] With regard to the description above of fusion proteins, conjugates or complexes incorporating an IL-17A binding polypeptide according to the disclosure, it is to be noted that the designation of first, second and further moieties is made for clarity reasons to distinguish between IL-17A binding polypeptide or polypeptides according to the invention on the one hand, and moieties exhibiting other functions on the other hand. These designations are not intended to refer to the actual order of the different domains in the polypeptide chain of the fusion protein, conjugate or complex. Thus, for example, said first moiety may without restriction appear at the N-terminal end, in the middle, or at the C-terminal end of the fusion protein, conjugate or complex.

[0235] The disclosure furthermore encompasses polypeptides in which the IL-17A binding polypeptide according to the first aspect, the IL-17A binding polypeptide as comprised in a fusion protein or conjugate according to the second aspect or in a complex according to the third aspect, further comprises a label, such as a label selected from the group consisting of fluorescent dyes and metals, chromophoric dyes, chemiluminescent compounds and bioluminescent proteins, enzymes, radionuclides and particles. Such labels may for example be used for detection of the polypeptide.

[0236] In embodiments where the labeled IL-17A binding polypeptide comprises an IL-17A binding polypeptide according to the first aspect of the disclosure and a label, this labeled polypeptide may be used for indirect labeling of IL-17A expressing cells, such as cells of inflammation-associated cancers. Non-limiting examples of inflammation-associated cancers include gastric cancers, colorectal cancers, non-small cell lung cancers, hepatocellular carcinomas and adenocarcinomas (Wu et al., 2014 Tumour Biol. 35(6):5347-56; Wu et al., 2012 PLoS One 7(12); Zhang et al. 2012 Asian Pac J Cancer Prev 13(8):3955-60; Liu et al., 2011 Biochem Biophys Res Commun.407(2):348-54).

[0237] In other embodiments, the labeled IL-17A binding polypeptide is present as a moiety in a fusion protein, conjugate or complex also comprising a second and possible further moiety having a desired biological activity. The label may in some instances be coupled only to the IL-17A binding polypeptide, and in some instances both to the IL-17A binding polypeptide and to the second moiety of the fusion protein or conjugate and/or the antibody or antigen binding fragment of the complex. Furthermore, it is also possible that the label may be coupled to a second moiety, or antibody or antigen binding fragment thereof only and not to the IL-17A binding moiety. Hence, in yet another embodiment, there is provided an IL-17A binding polypeptide comprising a second moiety, wherein said label is coupled to the second moiety only. In another embodiment, there is provided a complex as defined herein, wherein said label is coupled to the antibody or antigen binding fragment thereof only.

[0238] In one embodiment, said IL-17A binding polypeptide, fusion protein, conjugate or complex as described herein comprises a chelating environment provided by a polyaminopolycarboxylate chelator conjugated to the IL-17A binding polypeptide via a thiol group of a cysteine residue or an amine group of a lysine residue.

[0239] In embodiments where the IL-17A binding polypeptide, fusion protein, conjugate or complex is radiolabeled, such a radiolabeled polypeptide may comprise a radionuclide. A majority of radionuclides have a metallic nature and metals are typically incapable of forming stable covalent bonds with elements presented in proteins and peptides. For this reason, labeling of proteins and peptides with radioactive metals is performed with the use of chelators, i.e. multidentate ligands, which form non-covalent compounds, called chelates, with the metal ions. In an embodiment of the IL-17A binding polypeptide, fusion protein, conjugate or complex, the incorporation of a radionuclide is enabled through the provision of a chelating environment, through which the radionuclide may be coordinated, chelated or complexed to the polypeptide.

[0240] One example of a chelator is the polyaminopolycarboxylate type of chelator. Two classes of such polyaminopolycarboxylate chelators can be distinguished: macrocyclic and acyclic chelators.

[0241] In one embodiment, the IL-17A binding polypeptide, fusion protein or conjugate comprises a chelating environment provided by a polyaminopolycarboxylate chelator conjugated to the IL-17A binding polypeptide via a thiol group of a cysteine residue or an epsilon amine group of a lysine residue.

[0242] The most commonly used macrocyclic chelators for radioisotopes of indium, gallium, yttrium, bismuth, radioactinides and radiolanthanides are different derivatives of DOTA (1,4,7,10-tetraazacyclododecane-1,4,7,10-tetraacetic acid). In one embodiment, a chelating environment of the IL-17A polypeptide, fusion protein, conjugate or complex is provided by DOTA or a derivative thereof. More specifically, in one embodiment, the chelating polypeptides encompassed by the present disclosure are obtained by reacting the DOTA derivative 1,4,7,10-tetraazacyclododecane-1,4,7-tris-acetic acid-10-maleimidoethylacetamide (maleimidomonoamide-DOTA) with said polypeptide.

[0243] Additionally, 1,4,7-triazacyclononane-1,4,7-triacetic acid (NOTA) and derivatives thereof may be used as chelators. Hence, in one embodiment, there is provided an IL-17A binding polypeptide, fusion protein, conjugate or complex, wherein the the polyaminopolycarboxylate chelator is 1,4,7-triazacyclononane-1,4,7-triacetic acid or a derivative thereof.

[0244] The most commonly used acyclic polyaminopolycarboxylate chelators are different derivatives of DTPA (diethylenetriamine-pentaacetic acid). Hence, polypeptides having a chelating environment provided by diethylenetriaminepentaacetic acid or derivatives thereof are also encompassed by the present disclosure.

[0245] In one embodiment, said IL-17A binding polypeptide, fusion protein, conjugate or complex as described herein further comprises one or more polyethylene glycol (PEG) moieties, e.g. in order to improve pharmacokinetic properties of the molecule.

[0246] In a fourth aspect of the present disclosure, there is provided a polynucleotide encoding an IL-17A binding polypeptide or a fusion protein as described herein; an expression vector comprising said polynucleotide; and a host cell comprising said expression vector.

[0247] Also encompassed by this disclosure is a method of producing a polypeptide or fusion protein as described above, comprising culturing said host cell under conditions permissive of expression of said polypeptide from its expression vector, and isolating the polypeptide.

[0248] The IL-17A binding polypeptide of the present disclosure may alternatively be produced by non-biological peptide synthesis using amino acids and/or amino acid derivatives having protected reactive side-chains, the non-biological peptide synthesis comprising

[0249] step-wise coupling of the amino acids and/or the amino acid derivatives to form a polypeptide according to the first aspect having protected reactive side-chains,

[0250] removal of the protecting groups from the reactive side-chains of the polypeptide, and

[0251] folding of the polypeptide in aqueous solution.

[0252] It should be understood that the IL-17A binding polypeptide according to the present disclosure may be useful as a therapeutic, diagnostic or prognostic agent in its own right or as a means for targeting other therapeutic or diagnostic agents, with e.g. direct or indirect effects on IL-17A. A direct therapeutic effect may for example be accomplished by inhibiting IL-17A signaling, such as by blocking IL-17A from binding to one or more of its receptors.

[0253] In another aspect, there is provided a composition comprising an IL-17A binding polypeptide, fusion protein, conjugate or complex as described herein and at least one pharmaceutically acceptable excipient or carrier. In one embodiment, said composition further comprises at least one additional active agent, such as at least two additional active agents, such as at least three additional active agents. Non-limiting examples of additional active agents that may prove useful in such a composition are the therapeutically active polypeptides, immune response modifying agents and toxic compounds described herein.

[0254] The skilled person will appreciate that said IL-17A binding polypeptide, fusion protein, conjugate or complex, or a pharmaceutical composition comprising an anti-IL-17A binding polypetide, fusion protein, conjugate or complex as described herein may be administered to a subject using standard administration techniques, such as including oral, topical, intravenous, intraperitoneal, subcutaneous, pulmonary, transdermal, intramuscular, intranasal, buccal, sublingual or suppository administration. Thus, in one embodiment there is provided an IL-17A binding polypeptide, fusion protein, conjugate or complex or a pharmaceutical composition as described herein for oral, topical, intravenous, intraperitoneal, subcutaneous, pulmonary, transdermal, intramuscular, intranasal, buccal, sublingual or suppository administration. In one particular embodiment there is provided an IL-17A binding polypeptide, fusion protein, conjugate or complex or a pharmaceutical composition as described herein for oral administration. In another particular embodiment there is provided an IL-17A binding polypeptide, fusion protein, conjugate or complex or a pharmaceutical composition as described herein for topical administration, such as topical administration to the eye.

[0255] IL-17A may also serve as a valuable marker to for diagnosis and prognosis of certain cancers, such as inflammation-associated cancers for example gastric cancers, colorectal cancers, non-small cell lung cancers, hepatocellular carcinomas and adenocarcinomas. For example, IL-17 has been linked to the prognosis and poor survival in patients suffering from colorectal carcinoma and hepatocellular carcinoma.

[0256] Hence, in another aspect of the present disclosure, there is provided an IL-17A binding polypeptide, fusion protein, conjugate, complex or composition as described herein for use as a medicament, a diagnostic agent or a prognostic agent.

[0257] In one embodiment, there is provided an IL-17A binding polypeptide, fusion protein, conjugate, complex or composition as described herein, for use as a medicament to modulate IL-17A function in vivo. As used herein, the term “modulate” refers to changing the activity, such as rendering IL-17A function hypomorph, partially inhibiting or fully inhibiting IL-17A function.

[0258] Non-limiting examples of IL-17A associated conditions or diseases, wherein the IL-17A binding polypeptides may be useful for treatment, prognosis and/or diagnosis of include arthritis, such as rheumatoid arthritis, arthritis chronica progrediente, arthritis deformans and rheumatic diseases, diseases involving bone loss, inflammatory pain, spondyloarhropathies including ankylosing spondylitis, Reiter syndrome, reactive arthritis, psoriatic arthritis, enterophathc arthritis, pauciarticular rheumatoid arthritis, polyarticular rheumatoid arthritis, systemic onset rheumatoid arthritis, osteoarthritis; hypersensitivity conditions, such as hypersensitivity (including both airways hypersensitivity and dermal hypersensitivity), allergies and responses to allergen exposure; gastrointestional conditions or diseases, such as autoimmune inflammatory bowel disease (including e.g. ulcerative colitis, Crohn's disease and Irritable Bowel Syndrome), celiac disease (idiopathic sprue), intraperitoneal abscesses and adhesions, primary biliary sclerosis, sclerosing cholangitis, autoimmune hepatitis, viral hepatitis, chronic active hepatitis and Helicobacter pylori associated gastritis; ophthalmic conditions and diseases, such as endocrine ophthalmopathy, Graves disease, uveitis (anterior and posterior), keratoconjunctivitis sicca (dry eye disease), vernal keratoconjunctivitis, herpetic stromal keratitis and dry eye disease; nephrological conditions and disease, such as glomerulonephritis (with and without nephrotic syndrome, e.g. including idiopathic nephrotic syndrome or minimal change nephropathy); acute conditions and disease, such as acute and hyperacute inflammatory reactions, septic shock (e.g., endotoxic shock and adult respiratory distress syndrome), meningitis, pneumonia, severe burns, acute infections, septicemia, stroke and ischemia; cachexia (wasting syndrome), such as cachexia associated with morbid TNF release, cachexia consequent to infection, cachexia associated with cancer, cachexia associated with organ dysfunction and AIDS-related cachexia; bone related conditions and diseases, such as diseases of bone metabolism including osteoarthritis, osteoporosis, inflammatory arthritides, bone loss such as age-related bone loss, periodontal disease, loosening of bone implants and bone erosion; juvenile conditions and diseases, such as juvenile rheumatoid arthritis, pauciarticular juvenile rheumatoid arthritis, polyarticular juvenile rheumatoid arthritis, systemic onset juvenile rheumatoid arthritis, juvenile ankylosing spondylitis, juvenile enteropathic arthritis, juvenile reactive arthritis, juvenile Reiter's Syndrome, SEA Syndrome (Seronegativity, Enthesopathy, Arthropathy Syndrome), juvenile dermatomyositis, juvenile psoriatic arthritis, juvenile scleroderma, juvenile systemic lupus erythematosus and juvenile vasculitis; vasculitis including vasculitis of large vessels, such as Polymyalgia rheumatica, Takayasu's arteritis and Temporal arteritis, vasculitis of medium vessels, such as Buerger's disease, Cutaneous vasculitis, Kawasaki disease and Polyarteritis nodosa, vasculitis of small vessels, such as Behçet's syndrome, Churg-Strauss syndrome, cutaneous vasculitis, Henoch-Schönlein purpura, microscopic polyangiitis, Wegener's granulomatosis and Golfer's vasculitis, vasculitis of variable vessels and arteritis; dermatological conditions or diseases, such as psoriasis, plaque psoriasis, guttate psoriasis, inverse psoriasis, pustular psoriasis, erythrodermic psoriasis, dermatitis and atopic dermatitis; pulmonary conditions and diseases, such as obstructive or inflammatory airways diseases, asthma, bronchitis, COPD, pneumoconiosis, pulmonary emphysema, acute and hyperacute inflammatory reactions, interstitial lung fibrosis, airway inflammation and bronchial asthma; metabolic conditions and diseases, such as atherosclerosis, dyslipidemia and Type I diabetes mellitus; as well as other systemic autoimmune conditions and diseases, such as systemic lupus erythematosus (SLE), lupus nephritis, polychondritis, myasthenia gravis, Steven-Johnson syndrome, tumors, myositis, dermatomyositis, adult-onset Still's disease, polymyalgia rheumatica, sarcoidosis, scleroderma, sclerosis, systemic sclerosis, Sjogren's syndrome, multiple sclerosis (MS), Guillain-Barre disease, Addison's disease and Raynaud's phenomenon.

[0259] The IL-17A binding polypeptides as disclosed herein may furthermore be useful for the treatment of recipients of heart, lung, combined heart-lung, liver, kidney, pancreatic, skin or corneal transplants, including allograft rejection or xenograft rejection, and for the prevention of graft-versus-host disease, such as following bone marrow transplant, and organ transplant associated arteriosclerosis.

[0260] The IL-17A binding polypeptides as disclosed herein may furthermore be useful for the treatment, diagnosis or prognosis of inflammation-associated cancers. The term “cancer” as used herein refers to tumor diseases and/or cancer, such as metastatic or invasive cancers, for example lung cancer, non small cell lung (NSCL) cancer, bronchioloalviolar cell lung cancer, bone cancer, pancreatic cancer, skin cancer, cancer of the head or neck, cutaneous or intraocular melanoma, rectal cancer, cancer of the anal region, stomach cancer, gastric cancer, colon cancer, colorectal cancer, cancer of the small intestines, esophageal cancer, liver cancer, pancreas cancer, breast cancer, ovarian cancer, uterine cancer, carcinoma of the fallopian tubes, carcinoma of the endometrium, carcinoma of the cervix, carcinoma of the vagina, carcinoma of the vulva, Hodgkin's Disease, cancer of the endocrine system, cancer of the thyroid gland, cancer of the parathyroid gland, cancer of the adrenal gland, sarcoma of soft tissue, cancer of the urethra, cancer of the penis, prostate cancer, bladder cancer, cancer of the kidney or ureter, renal cell carcinoma, carcinoma of the renal pelvis, mesothelioma, hepatocellular carcinoma, biliary cancer, neoplasms of the central nervous system (CNS), spinal axis tumors, brain stem glioma, glioblastoma multiforme, astrocytomas, schwanomas, ependymonas, medulloblastomas, meningiomas, squamous cell carcinomas, pituitary adenoma, adenocarcinomas, lymphoma, lymphocytic leukemia, or cancer of unknown origin, or other hyperplastic or neoplastic IL-17A associated condition, including refractory versions of any of the above cancers or a combination of one or more of the above cancers or hyperproliferative diseases.

[0261] Non-limiting examples of inflammation-associated cancers include gastric cancers, colorectal cancers, non-small cell lung cancers, hepatocellular carcinomas and adenocarcinomas.

[0262] In one embodiment, there is provided an IL-17A binding polypeptide, fusion protein, conjugate, complex or composition for use in the treatment, diagnosis or prognosis of an IL-17A associated condition, such as a condition selected from the group consisting of inflammatory diseases, autoimmune diseases and cancer, such as inflammatory diseases and autoimmune diseases. In one embodiment, said condition is selected from the group consisting of inflammatory conditions, allergic conditions, hypersensitivity reactions, autoimmune diseases, severe infections and transplant rejections.

[0263] In one particular embodiment, said IL-17A associated condition is selected from the group consisting of rheumatoid arthritis, ankylosing spondylitis, psoriatic arthritis, psoriasis, multiple sclerosis, systemic lupus erythematosus, uveitis and dry eye disease.

[0264] In an even more particular embodiment, said IL-17A associated condition is psoriasis.

[0265] In another embodiment, said IL-17A associated condition is an inflammation-associated cancer, such as a cancer selected from the group consisting of gastric cancers, colorectal cancers, non-small cell lung cancers, hepatocellular carcinomas and adenocarcinomas.

[0266] In a related aspect, there is provided a method of detecting IL-17A, comprising providing a sample suspected to contain IL-17A, contacting said sample with an IL-17A binding polypeptide, fusion protein, conjugate, complex or composition as described herein, and detecting the binding of the IL-17A binding polypeptide, fusion protein, conjugate, complex or composition to indicate the presence of IL-17A in the sample. In one embodiment, said method further comprises an intermediate washing step for removing non-bound polypeptide, fusion protein, conjugate, complex or composition, after contacting the sample.

[0267] In one embodiment, said method is a diagnostic or prognostic method, for determining the presence of IL-17A in a subject, the method comprising the steps:
[0268] contacting the subject, or a sample isolated from the subject, with an IL-17A binding polypeptide, fusion protein, conjugate, complex or composition as described herein, and
[0269] obtaining a value corresponding to the amount of the IL-17A binding polypeptide, fusion protein, conjugate, complex or composition that has bound in said subject or to said sample.

[0270] In one embodiment, said method further comprises an intermediate washing step for removing non-bound polypeptide, fusion protein, conjugate, complex or composition, after contacting the subject or sample and before obtaining a value.

[0271] In one embodiment, said method further comprises a step of comparing said value to a reference. Said reference may be scored by a numerical value, a threshold or a visual indicator, for example based on a color reaction. The skilled person will appreciate that different ways of comparison to a reference are known in the art may be suitable for use.

[0272] In one embodiment of such a method, said subject is a mammalian subject, such as a human subject.

[0273] In one embodiment, said method is performed in vivo.

[0274] In one embodiment, said method is performed in vitro.

[0275] In a related aspect, there is provided a method of treatment of an IL-17A associated condition, comprising administering to a subject in need thereof an effective amount of an IL-17A binding polypeptide, fusion protein, conjugate, complex or composition as described herein. In a more specific embodiment of said method, the IL-17A binding polypeptide, fusion protein, conjugate, complex or composition as described herein modulates IL-17A function in vivo.

[0276] In one embodiment, said IL-17A associated condition is selected from the group consisting of inflammatory diseases, autoimmune diseases and cancer, such as a group consisting of inflammatory diseases and autoimmune diseases. In one particular embodiment of said aspect, the IL-17A associated condition is selected from the group consisting of inflammatory conditions, allergic conditions, hypersensitivity reactions, autoimmune diseases, severe infections and transplant rejections. In one embodiment, said IL-17A associated condition is selected from the group consisting of rheumatoid arthritis, ankylosing spondylitis, psoriatic arthritis, psoriasis, multiple sclerosis, systemic lupus erythematosus, uveitis and dry eye disease. In a more specific embodiment, said IL-17A associated condition is psoriasis. In another embodiment, said IL-17A associated condition is cancer, such as a cancer selected from the group consisting of gastric cancers, colorectal cancers, non-small cell lung cancers, hepatocellular carcinomas and adenocarcinomas.

[0277] It may be beneficial to administer a therapeutically effective amount of an IL-17A binding polypeptide, fusion protein, conjugate, complex or composition as described herein together with least one second drug substance, such as an immune response modifying agent, toxic compound or an anti-cancer agent.

[0278] As used herein, the term “co-adminstration” encompasses concomitant adminstration and adminstration in sequence. Thus, in one embodiment, there is provided a method as defined above, further comprising co-administration of an immune response modulating agent. In another embodiment, there is provided a method as defined above, further comprising co-administration of an additional anti-inflammatory agent. In another embodiment, there is provided a method as defined above, further comprising co-administration of a toxic compound. In another embodiment, there is provided a method as defined above, further comprising co-administration of an anti-cancer agent.

[0279] Non-limiting examples of immune response modulating agents and toxic compounds are given above. Non-limiting examples of anti-cancer agents include agents selected from the group consisting of auristatin, anthracycline, calicheamycin, combretastatin, doxorubicin, duocarmycin, the CC-1065 anti-tumorantibiotic, ecteinsascidin, geldanamycin, maytansinoid, methotrexate, mycotoxin, taxol, ricin, bouganin, gelonin, pseudomonas exotoxin 38 (PE38), diphtheria toxin (DT), and their analogues, and derivates thereof and combinations thereof. A skilled person would appreciate that the non-limiting examples of cytotoxic agents include all possible variant of said agents, for example the agent auristatin includes for example auristatin E, auristatin F, auristatin PE, and derivates thereof.

[0280] While the invention has been described with reference to various exemplary aspects and embodiments, it will be understood by those skilled in the art that various changes may be made and equivalents may be substituted for elements thereof without departing from the scope of the invention. In addition, many modifications may be made to adapt a particular situation or molecule to the teachings of the invention without departing from the essential scope thereof. Therefore, it is intended that the invention not be limited to any particular embodiment contemplated, but that the invention will include all embodiments falling within the scope of the appended claims.

### BRIEF DESCRIPTION OF THE FIGURES

[0281] FIG. 1 is a listing of the amino acid sequences of examples of IL-17A binding polypeptides of the present disclosure (SEQ ID NO:1-1222), a control polypeptide (SEQ ID NO:1223), the albumin binding polypeptides PP013 (SEQ ID NO:1224) and PEP07843 (SEQ ID NO:1225) as well as the amino acid sequences of human IL-17A (SEQ ID NO:1226), murine IL-17A (SEQ ID NO:1227), cynomolgus monkey IL-17A (SEQ ID NO:1229), rhesus monkey IL-17A (SEQ ID NO:1230) and human IL-17F (SEQ ID NO:1228) used for selection, screening and/or characterization for illustration of the invention. In the IL-17A binding polypeptides of the present disclosure, the deduced IL-17A binding motifs (BMs) extend from residue 8 to residue 36 in each sequence. The amino acid sequences of the 49 amino acid residues long polypeptides (BMod) predicted to constitute the complete three-helix bundle within each of these Z variants extend from residue 7 to residue 55.

[0282] FIG. 2 shows inhibition of IL-17A induced IL-6 production assessed by the NHDF assay described in Example 3. (A) His₆-Z06260 (open dimonds), His₆-Z06282 (open squares) and His₆-Z06455 (open circles) were titrated in a medium containing IL-17A. (B) Z06260-ABD (closed diamonds), His₆-Z06282 (open squares), Z06282-ABD (filled squares), His₆-Z06455 (open circles) and Z06455-ABD (filled circles) were titrated in a medium containing IL-17A and HSA.

[0283] FIG. 3 shows the IL-17A binding capacity of a set of Z variants from the first and second maturation library assayed by ELISA as described in Example 8. The results are displayed as percent binding capacity compared to the IL-17A binding variant Z10241 (SEQ ID NO:11).

[0284] FIG. 4 shows the result of binding specificity analysis performed in a Biacore instrument as described in Example 8. Sensorgrams were obtained by injection of 20 nM of the His₆-tagged Z variants Z10508 (SEQ ID NO:2) (A), Z10532 (SEQ ID NO:1) (B) and Z15167 (SEQ ID NO:4) (C) over human IL-17A (black), human IL-17A/F (dark grey) and human IL-17F (light grey), respectively, immobilized on the surface of a CM5 chip.

[0285] FIG. 5 shows inhibition of IL-17A induced IL-6 production for a selection of Z variants originating from the first maturation selection (solid curves) compared to one binder from the primary selection (broken curve) assayed as described in Example 8. All binders inhibited IL-17A in a dose dependent manner and the maturated binders had an increased blocking capacity compared to the primary binder.

[0286] FIG. 6 shows binding of human IL-17A (grey) and cynomolgus IL-17A (black) to (A) ZAZ3363 (SEQ ID NO:1244), (B) ZAZ3364 (SEQ ID NO:1245) and (C) ZAZ3365 (SEQ ID NO:1246), analyzed in a Biacore instrument as described in Example 11. The resulting curves, from which responses from a blank surface were subtracted, correspond to injections of the respective IL-17A protein at concentrations 2.5, 10 and 40 nM.

[0287] FIG. 7 shows inhibition of IL-17A induced IL-6 production in the NHDF assay described in Example 14. FIG. 7A shows a superior inhibitory efficacy with the dimeric Z-ABD-Z polypeptide ZAZ3220 (SEQ ID NO:1236; solid black line) compared to the corresponding monomeric Z variant Z10241 (SEQ ID NO:11; dotted black line). FIG. 7B shows an evaluation of different linker lengths between the Z and the ABD moieties in Z-ABD-Z polypeptides comprising the Z variant Z06282 (SEQ ID NO:1206). The Z-ABD-Z polypeptides ZAZ3174 (SEQ ID NO:1233), ZAZ3176 (SEQ ID NO:1235), ZAZ3234 (SEQ ID NO:1238), ZAZ3235 (SEQ ID NO:1239), ZAZ3236 (SEQ ID NO:1240) and ZAZ3237 (SEQ ID NO:1241) with various numbers of G₄S repeats, or minimal linkers, on each side of the ABD were compared.

[0288] FIG. 8 shows dose dependent inhibition by Z-ABD-Z polypeptides in the hIL-17A induced KC-model described in Example 15. (A) Complete inhibition of KC production by ZAZ3174 (SEQ ID NO:1233) was obtained at a dose of 2.5 mg/kg. (B) Complete inhibition of KC production by ZAZ3220 (SEQ ID NO:1236) was obtained at a dose of 0.4 mg/kg. Doses indicated on the x-axis are given in mg/kg and the corresponding pmol dose. The numbers above the bar indicate percent inhibition in each dose group; 72% inhibition was obtained with 0.1 mg/kg ZAZ3220. LOQ=limit of quantification.

[0289] FIG. 9 shows the pharmacokinetic profiles of the Z-ABD-Z polypeptides (A) ZAZ3220 (SEQ ID NO:1236) and (B) ZAZ3363 (SEQ ID NO:1244), following a single i.v. (black line) or s.c. (gray broken line) administration to SD rats as described in Example 16. The mean serum concentrations versus time is displayed.

[0290] FIG. 10 shows the result of topical administration to the eyes of rabbits performed as described in Example 17. Uptake of Z variant Z10199 (SEQ ID NO:1217) and the Z-ABD-Z polypeptide ZAZ3174 (SEQ ID NO:1233) was demonstrated both in aqueous humor and vitreous humor, whereas the control IgG antibody did not penetrate the eye.

[0291] FIG. 11 shows the activity of ZAZ3363 (SEQ ID NO:1244) formulated in OAF1and OAF2, respectively, in comparison to formulation in PBS, and analyzed in the NHDF assay described in Example 18. A) OAF1 (filled circles), PBS (crosses) and OAF1 without ZAZ3363 (open diamonds). B) OAF2 (open triangles), PBS (crosses) and OAF2 without ZAZ3363 (open diamonds).

[0292] FIG. 12 shows the pharmacokinetic profile of intraduodenal administration of ZAZ3363 formulated in OAF1 (filled circles), OAF2 (open triangles) and PBS (crosses) performed as described in Example 18.

[0293] FIG. 13 shows the evaluation of the complexes HC_{Ada}-Z14253 and LC_{Ada}-Z14253 in the NHDF assay described in Example 19. (A) Schematic of the complexes HC_{Ada}-Z14253 (left) and LC_{Ada}-Z14253 (right). (B) Inhibition of IL-17A induced IL-6 production. (C) Inhibition of TNF-induced IL-8 production. (D) Inhibition of TNF and IL-17A-induced IL-8 production. Z04726-ABD is a negative control, included in all three assays.

[0294] FIG. 14 shows the pharmacokinetic profiles of the Z-ABD-Z polypeptide ZAZ3363 (SEQ ID NO:1244) in cynomolgus monkeys following i.v. administration of 20 mg/kg (black) or 40 mg/kg (grey) on day 1, 4, 7 and 10 as described in Example 20. Mean plasma concentrations versus time are shown following analysis of (A) the first injection on day 1 and (B) the fourth injection on day 10. Error bars represent standard deviation.

[0295] FIG. 15 shows the pharmacokinetic profiles of the Z-ABD-Z polypeptide ZAZ3363 (SEQ ID NO:1244) in individual beagle dogs following oral administration. 150 mg of ZAZ3363 was administered as enteric coated capsules on day 0.

### EXAMPLES

### Summary

[0296] The following Examples disclose the development of novel Z variant molecules targeted to interleukin 17A (IL-17A) based on phage display technology. The IL-17A binding polypeptides described herein were sequenced, and their amino acid sequences are listed in FIG. 1 with the sequence identifiers SEQ ID NO:1-1222. The Examples further describe the characterization of IL-17A binding polypeptides and in vitro and in vivo functionality of said polypeptides.

### Example 1

### Selection and Screening of IL-17A Binding Z Variants

### Materials and Methods

[0297] Biotinylation of target protein: Human IL-17A (hIL-17A Peprotech cat. no. 200-17; SEQ ID NO:1226) and murine IL-17A (mIL-17A Peprotech cat. no. 210-17; SEQ ID NO:1227) were biotinylated according to the manufacturer's recommendations at room temperature (RT) for 30 min using No-Weigh EZ-Link Sulfo-NHS-LC-Biotin (Thermo Scentific, cat. no. 21327) at a 20× molar excess. Subsequent buffer exchange to phosphate buffered saline (PBS,10 mM phosphate, 137 mM NaCl, 2.68 mM KCl, pH 7.4) was performed using a dialysis cassette (Slide-a-lyzer 3.5 K, 3500 MWCO, Thermo Scentific, cat. no. 66333) according to the manufacturer's instructions.

[0298] Phage display selection of IL-17A binding Z variants: A library of random variants of protein Z displayed on bacteriophage, constructed in phagemid pAY02592 essentially as described in Grönwall et al. (2007) J Biotechnol, 128:162-183, was used to select IL-17A binding Z variants. In this library, an albumin binding domain (abbreviated ABD and corresponding to GA3 of protein G from Streptococcus strain G148) is used as fusion partner to the Z variants. The library is denoted Zlib006Naive.II and has a size of 1.5×10¹⁰ library members (Z variants). E. coli RRIΔM15 cells (Rüther et al., (1982) Nucleic Acids Res 10:5765-5772) from a glycerol stock containing the phagemid library Zlib006Naive.II, were inoculated in 20 l of a defined proline free medium [3 g/l KH₂PO₄, 2 g/l K₂HPO₄, 0.02 g/l uracil, 6.7 g/l YNB (Difco™ Yeast Nitrogen Base w/o amino acids, Becton Dickinson), 5.5 g/l glucose monohydrate, 0.3 g/l L-alanine, 0.24 g/l L-arginine monohydrochloride, 0.11 g/l L-asparagine monohydrate, 0.1 g/l L-cysteine, 0.3 g/l L-glutamic acid, 0.1 g/l L-glutamine, 0.2 g/l glycine, 0.05 g/l L-histidine, 0.1 g/l L-isoleucine, 0.1 g/l L-leucine, 0.25 g/l L-lysine monohydrochloride, 0.1 g/l L-methionine, 0.2 g/l L-phenylalanine, 0.3 g/l L-serine, 0.2 g/l L-threonine, 0.1 g/l L-tryptophane, 0.05 g/l L-tyrosine, 0.1 g/l L-valine], supplemented with 100 μg/ml ampicillin. The cultivations were grown at 37° C. in a fermenter (Belach Bioteknik, BR20). When the cells reached an optical density at 600 nm (OD₆₀₀) of 0.75, approximately 2.6 l of the cultivation was infected using a 10× molar excess of M13K07 helper phage (New England Biolabs, cat. no. N0315S). The cells were incubated for 30 min, whereupon the fermenter was filled up to 20 l with cultivation medium [2.5 g/l (NH₄)₂SO₄; 5.0 g/l Yeast Extract (Merck 1.03753.0500); 25 g/l Peptone (Scharlau 07-119); 2 g/l K₂HPO₄; 3 g/l KH₂PO₄; 1.25 g/l Na₃C₆H₅O₇.2 H₂O; 0.1 ml/l Breox FMT30 antifoaming agent] supplemented with 100 μM isopropyl-β-D-1-thiogalactopyranoside (IPTG) for induction of expression and with 50 μg/ml ampicillin, 12.5 μg/ml carbenicillin, 25 μg/ml kanamycin, 35 ml/l of 1.217 M MgSO₄ and 10 ml of a trace element solution [129 mM FeCl₃; 36.7 mM ZnSO₄; 10.6 mM CuSO₄; 78.1 mM MnSO₄; 94.1 mM CaCl₂, dissolved in 1.2 M HCl]. A glucose-limited fed-batch cultivation was started where a 600 g/l glucose solution was fed to the reactor (15 g/h in the start, 40 g/h at the end of the fermentation after 17 h). Through the automatic addition of 25% NH₄OH, the pH was controlled at 7. Air was supplemented (10 l/min) and the stirrer was set to keep the dissolved oxygen level above 30%. The cells in the cultivation were removed by tangential flow filtration.

[0299] The phage particles were precipitated from the supernatant twice in PEG/NaCl (polyethylene glycol/sodium chloride), filtered and dissolved in PBS and glycerol as described in Grönwall et al., supra. Phage stocks were stored at −80° C. before use.

[0300] Selections against biotinylated hIL-17A (b-hIL-17A) or biotinylated mIL-17A (b-mIL-17A) were performed in four cycles divided in six different tracks (Table 2). Phage stock preparation, selection procedure and amplification of phage between selection cycles were performed essentially as described in WO2009/077175 for selection against another target with the following exceptions. Exception 1: PBS supplemented with 3% bovine serum albumin (BSA, Sigma, cat. no. A3059) and 0.1% Tween20 (Acros Organics, cat. no. 233362500) was used as selection buffer. Exception 2: pre-selection was performed in cycles 1-3 by incubation of phage stock with Dynabeads® M-280 Streptavidin (SA beads, Invitrogen, cat. no. 11206D). Exception 3: all tubes and beads used in the selections were pre-blocked with PBS supplemented with 5% BSA and 0.1% Tween20. Exception 4: selections were performed in solution at RT and the time for selection was 200 min in the first cycle and 120 min in the following cycles. Exception 5: this was followed by catching of target-phage complexes on SA beads using 1 mg beads per 6.4 μg b-hIL-17A or b-mIL-17A. Exception 6: E. coli strain XL1-Blue cells (Agilent Technologies, cat. no. 200268) grown in medium supplemented with 10 μg/ml tetracycline (exception 7) were used for infection. Exception 8: tryptone yeast extract plates (15 g/l agar, 10 g/l tryptone water (Merck), 5 g/l yeast extract, 3 g/l NaCl, 2% glucose) supplemented with 0.1 g/l ampicillin and 0.01 g/l tetracycline were used for spreading of bacteria. Exception 9: a 10× excess of M13K07 helper phage compared to bacteria was allowed to infect log phase bacteria.

[0301] An overview of the selection strategy, describing an increased stringency in subsequent cycles obtained using a lowered target concentration and an increased number of washes, is shown in Table 2.

TABLE 2
Overview of the selection from a primary library

| | | Phage stock | | Target | | Higher amount |
|---|---|---|---|---|---|---|
| | Selection | from library or | | concentration | Number of | of phage into |
| Cycle | track | selection track | Target | (nM) | washes | selection track |
| 1 | 1 | Zlib006Naive.II | hIL-17A | 50 | 2 | — |
| 2 | 1-1 | 1 | hIL-17A | 25 | 4 | Yes |
| 2 | 1-2 | 1 | hIL-17A | 25 | 4 | — |
| 2 | 1-3 | 1 | hIL-17A | 5 | 5 | — |
| 2 | 1-4 | 1 | mIL-17A | 50 | 4 | — |
| 3 | 1-1-1 | 1-1 | hIL-17A | 12.5 | 6 | Yes |
| 3 | 1-2-1 | 1-2 | hIL-17A | 12.5 | 6 | — |
| 3 | 1-3-1 | 1-3 | hIL-17A | 1 | 8 | — |
| 3 | 1-4-1 | 1-4 | hIL-17A | 12.5 | 6 | — |
| 3 | 1-4-2 | 1-4 | mIL-17A | 5 | 8 | — |
| 4 | 1-1-1-1 | 1-1-1 | hIL-17A | 5 | 8 | Yes |
| 4 | 1-2-1-1 | 1-2-1 | hIL-17A | 5 | 8 | — |
| 4 | 1-3-1-1 | 1-3-1 | hIL-17A | 0.25 | 12 | — |
| 4 | 1-3-1-2 | 1-3-1 | hIL-17A | 0.05 | 15 | — |
| 4 | 1-4-1-1 | 1-4-1 | mIL-17A | 5 | 8 | — |
| 4 | 1-4-2-1 | 1-4-2 | hIL-17A | 0.5 | 12 | — |

[0302] Track 1 was divided in the second to the fourth cycles, resulting in a total of four tracks (1-1 to 1-4) in cycle 2, five tracks (1-1-1 to 1-4-2) in cycle 3 and six tracks (1-1-1-1 to 1-4-2-1) in cycle 4. The number of phage particles used for selections was about 2000 times the number of eluted phage particles in the previous cycle, but a higher amount was used in selection tracks 1-1, 1-1-1 and 1-1-1-1.

[0303] Washes were performed for 1 min using PBST 0.1% (PBS supplemented with 0.1% Tween-20), and elution was carried out as described in WO2009/077175.

[0304] Production of Z variants for ELISA: The Z variants were produced by inoculating single colonies from the selections into 1 ml TSB-YE medium supplemented with 100 μg/ml ampicillin and 0.1 mM IPTG in deep-well plates (Nunc, cat. no. 278752). The plates were incubated for 18-24 h at 37° C. Cells were pelleted by centrifugation, re-suspended in 400 μl PBST 0.05% and frozen at −80° C. to release the periplasmic fraction of the cells. Frozen samples were thawed in a water bath and the freeze-thawing procedure was repeated six times. 400 μl PBST 0.05% was added to the thawed samples and cells were pelleted by centrifugation.

[0305] The final supernatant of the periplasmic extract contained the Z-variants as fusions to ABD, expressed as AQHDEALE-[Z#####]-VDYV-[ABD]-YVPG (Grönwall et al., supra). Z##### refers to individual 58 amino acid residue Z variants.

[0306] ELISA screening of Z variants: The binding of Z variants to human IL-17A was analyzed in ELISA assays. Half-area 96-well ELISA plates (Costar, cat. no. 3690) were coated at 4° C. overnight with 2 μg/ml of an anti-ABD goat antibody (produced in-house) diluted in coating buffer (50 mM sodium carbonate, pH 9.6; Sigma, cat. no. C3041). The antibody solution was poured off and the wells were washed in water and blocked with 100 μl of PBSC (PBS supplemented with 0.5% casein) for 1 to 3 h at RT. The blocking solution was discarded and 50 μl periplasmic solutions were added to the wells and incubated for 1.5 h at RT under slow agitation. As a blank control, PBST 0.05% was added instead of the periplasmic sample. The supernatants were poured off and the wells were washed 4 times with PBST 0.05%. Next, 50 μl of b-hIL-17A at a concentration of 6.5 nM in PBSC was added to each well. The plates were incubated for 1.5 h at RT followed by washes as described above. Streptavidin conjugated HRP (Thermo Scientific, cat. no. N100) diluted 1:30,000 in PBSC, was added to the wells and the plates were incubated for 1 h. After washing as described above, 50 μl ImmunoPure TMB substrate (Thermo Scientific, cat. no. 34021) was added to the wells and the plates were treated according to the manufacturer's recommendations. The absorbance at 450 nm was measured using a Victor³ multi-well plate reader (Perkin Elmer).

[0307] Sequencing: In parallel with the ELISA screening, all clones were picked for sequencing. PCR fragments were amplified from single colonies, sequenced and analyzed essentially as described in WO2009/077175.

### Results

[0308] Phage display selection of IL-17A binding Z variants: Individual clones were obtained after four cycles of phage display selections against b-hIL-17A and b-mIL-17A.

[0309] ELISA screening of Z variants: The clones obtained after four cycles of selection were expanded in 96-well plates and screened for hIL-17A binding activity in ELISA. 42 Z variants were found to give a response of 4× the blank control or higher (0.43-3.2 AU) against hIL-17A at a concentration of 6.5 nM. No response was obtained for the blank control.

[0310] Sequencing: Sequencing was performed for clones obtained after four cycles of selection. Each variant was given a unique identification number #####, and individual variants are referred to as Z#####. The amino acid sequences of the 58 amino acid residues long Z variants are listed in FIG. 1 and in the sequence listing as SEQ ID NO: 1200-1216. The deduced IL-17A binding motifs extend from residue 8 to residue 36 in each sequence. The amino acid sequences of the 49 amino acid residues long polypeptides predicted to constitute the complete three-helix bundle within each of these Z variants extend from residue 7 to residue 55.

### Example 2

### Production of Monomeric IL-17A Binding Z Variants

[0311] This Example describes the general procedure for subcloning and production of His-tagged Z variants and Z variants in fusion with ABD, which are used throughout in characterization experiments below.

### Materials and Methods

[0312] Subcloning of Z variants with a His-tag: The DNA of respective Z variant was amplified from the library vector pAY02592. A subcloning strategy for construction of monomeric Z variant molecules with N-terminal His₆ tag was applied using standard molecular biology techniques (essentially as described in WO2009/077175 for Z variants binding another target). The Z gene fragments were subcloned into the expression vector pAY01448 resulting in the encoded sequence MGSSHHHHHHLQ-[Z#####]-VD.

[0313] Subcloning of Z variants in fusion with ABD: The DNA of respective Z variant was amplified from the library vector pAY02592. A PCR was performed using suitable primer pairs and the resulting gene fragments were cleaved with restriction enzymes PstI and AccI and ligated into the expression vector pAY03362 digested with the same enzymes, resulting in an ABD fusion protein, wherein the ABD variant is PP013 (SEQ ID NO:1224). The constructs encoded by the expression vectors were MGSSLQ-[Z#####]-VDSS-PP013.

[0314] Cultivation: E. coli BL21(DE3) cells (Novagen) were transformed with plasmids containing the gene fragment of each respective IL-17A binding Z variant and cultivated at 37° C. in 800 or 1000 ml of TSB-YE medium supplemented with 50 μg/ml kanamycin. In order to induce protein expression, IPTG was added to a final concentration of 0.2 mM at OD₆₀₀=2 and the cultivation was incubated at 37° C. for another 5 h. The cells were harvested by centrifugation.

[0315] Purification of IL-17A binding Z variants with a His₆-tag: Approximately 2-5 g of each cell pellet was re-suspended in 30 ml of binding buffer (20 mM sodium phosphate, 0.5 M NaCl, 20 mM imidazole, pH 7.4) supplemented with Benzonase® (Merck) to a concentration of 15 U/ml. After cell disruption, cell debris was removed by centrifugation and each supernatant was applied on a 1 ml His GraviTrap IMAC column (GE Healthcare). Contaminants were removed by washing with wash buffer (20 mM sodium phosphate, 0.5 M NaCl, 60 mM imidazole, pH 7.4 and the IL-17A binding Z variants were subsequently eluted with elution buffer (20 mM sodium phosphate, 0.5 M NaCl, 500 mM imidazole, pH 7.4).

[0316] Purification of IL-17A binding Z variants in fusion with ABD: Approximately 1-2 g of each cell pellet was re-suspended in 30 ml TST-buffer (25 mM Tris-HCl, 1 mM EDTA, 200 mM NaCl, 0.05% Tween20, pH 8.0) supplemented with Benzonase® (Merck). After cell disruption by sonication and clarification by centrifugation, each supernatant was applied on a gravity flow column with 1 ml agarose immobilized with an anti-ABD ligand (produced in-house). After washing with TST-buffer and 5 mM NH₄Ac pH 5.5 buffer, the ABD fused Z variants were eluted with 0.1 M HAc. To fractions eluted in the anti-ABD agarose affinity chromatography purification step, acetonitrile (ACN) was added to a final concentration of 10% and the sample was loaded on 1 ml Resource 15RPC column (GE Healthcare), previously equilibrated with RPC solvent A (0.1% TFA, 10% ACN, 90% water). After column wash with RPC solvent A, bound proteins were eluted with a linear gradient 0-50% RPC solvent B (0.1% TFA, 80% ACN, 20% water) for 20 ml. Fractions containing pure ABD-fused Z variants were identified by SDS-PAGE analysis and pooled. After the RPC purification, the buffer of the pool was exchanged to PBS (2.68 mM KCl, 137 mM NaCl, 1.47 mM KH₂PO₄, 8.1 mM Na₂HPO₄, pH 7.4) using PD-10 columns (GE Healthcare). Finally, the ABD fused Z variants were purified on 1 ml EndoTrap® red columns (Hyglos) to ensure low endotoxin content.

[0317] Protein concentrations were determined by measuring the absorbance at 280 nm, using a NanoDrop® ND-1000 spectrophotometer and the extinction coefficient of the respective protein. The purity was analyzed by SDS-PAGE stained with Coomassie Blue and the identity of each purified Z variant was confirmed using LC/MS analysis.

### Results

[0318] Cultivation and purification: The IL-17A binding Z variants with a His₆-tag as well as the Z variants fused at their C-terminus to ABD, were expressed as soluble gene products in E. coli. The amount of purified protein from approximately 1-5 g bacterial pellet was determined spectrophotometrically by measuring the absorbance at 280 nm and ranged from approximately 5 mg to 20 mg for the different IL-17A binding Z variants. SDS-PAGE analysis of each final protein preparation showed that these predominantly contained the IL-17A binding Z variant. The correct identity and molecular weight of each Z variant were confirmed by HPLC-MS analysis.

### Example 3

### Assessment of Blocking Ability of Primary IL-17A Binding Z Variants

[0319] Normal human dermal fibroblasts (NHDF) produce IL-6 upon stimulation with IL-17A (Chang and Dong 2007, Cell Research 17:435-440) and the amount of released IL-6 to the supernatant is correlated to the concentration of added IL-17A. Thus, blocking of IL-17A leads to a reduction of IL-6 in the supernatant that can be quantified. In this Example, the assay was used to evaluate the blocking ability of IL-17A binding Z variants Z06260 (SEQ ID NO:1200), Z06282 (SEQ ID NO:1206) and Z06455 (SEQ ID NO:1214), alone or in fusion with ABD (PP013; SEQ ID NO:1224).

### Materials and Methods

[0320] NHDF assay with His₆-tagged Z-variants: NHDF cells (Lonza, cat. no. CC-2511) were cultured in fibroblast basal medium (Lonza, cat. no. CC-3132) supplied with growth promoting factors (Lonza, cat. no. CC-5034). On the day before the experiment, 10⁵ cells were seeded in 100 μl per well into 96-well culture plates (Greiner, cat. no. 655180). On the day of the experiment, dilutions of the IL-17A specific Z variants His₆-Z06260, His₆-Z06282 and His₆-Z06455 were prepared in a separate 96-well plate. The Z variants were titrated in three-fold steps from 3130 nM to 0.2 nM in medium containing 0.031 nM hIL-17A. A standard curve of hIL-17A was also prepared (0.002-31 nM) as well as controls containing medium with 0.031 nM hIL-17A or medium alone. The medium in the plate with the overnight cultured NHDF cells was discarded. Test samples, standard curve samples and controls were transferred to the cell-containing plate. The NHDF cells were stimulated for 18-24 h at 37° C. and the IL-6 content in the supernatants was subsequently quantified using the IL-6 specific ELISA described below.

[0321] NHDF assay with His₆-tagged and ABD fused Z variants: NHDF cells were prepared as described above. On the day of the experiment, dilutions of the IL-17A specific Z variant constructs His₆-Z06282, His₆-Z06455, Z06260-ABD, Z06282-ABD and Z06455-ABD were prepared in a separate 96-well plate. The Z variant constructs were titrated in four-fold steps from 780 nM to 0.2 nM in medium containing 0.031 nM IL-17A and 8 μM HSA. Preparation of a standard IL-17A curve and controls, as well as downstream analysis, was performed as described above.

[0322] IL-6 ELISA: 96-well half area plates (Costar, cat. no. 3690) were coated with the anti-IL-6 monoclonal antibody MAB206 (R&D systems) at a concentration of 4 μg/ml in PBS (50 μl/well) and incubated overnight at 4° C. On the next day, the plates were rinsed twice in tap water and blocked with PBS+2% BSA (Sigma) for 2 h. An IL-6 standard (R&D systems, cat. no. 206-IL-50), titrated in a 2-fold dilution series (0.2-50 ng/ml) and supernatants from the cell assay plate were added to the coated ELISA plates (50 μl/well) and incubated for 1.5 h at RT. The plates were washed 4 times in an automated ELISA washer and 0.25 μg/ml (50 μl/well) of biotinylated anti-IL-6 polyclonal antibody (R&D systems, BAF206) was added. After incubation for 1 h, the plate was washed and 50 μl of streptavidin-HRP (Thermo Fisher, cat. no. N100) diluted 8000 times was added to each well. After one additional hour of incubation and subsequent washing, the plate was developed with 50 μl TMB (Thermo Fisher, cat. no. 34021) per well and the reactions were stopped with 50 μl 2M H₂SO₄. The absorbance at 450 nm was measured in a 96-well plate reader (Victor³) and the concentration of IL-6 in each sample was calculated. The results are presented as the percentage of maximum IL-6 production, calculated as:

100−[(ABS_{IL-17A blocker}−ABS_{background})/(ABS_{Max IL-6 prod}−ABS_{background})]×100

### Results

[0323] Results from the first NHDF assay showed that all three Z variants His₆-Z06260, His₆-Z06282 and His₆-Z06455 blocked IL-17A induced IL-6 production in a dose dependent manner (FIG. 2A). The IC50 values were approximately 40-140 nM.

[0324] The NHDF assay was repeated with the same Z variants fused to ABD as well as inclusion of HSA in the assay to ascertain retained binding to the antigen when mimicking in vivo conditions. In vivo, ABD will bind to albumin and convey longer circulation half-life. The results showed that all three binders in fusion with ABD blocked IL-17A induced IL-6 production equally well or better than the His₆-tagged Z variants (FIG. 2B). The IC50 values from the second assay are summarized in Table 3.

TABLE 3
IC50 values for primary Z-variants blocking IL-17A
induced IL-6 production in the presence of HSA

| Analyte | SEQ ID NO of Z variant | IC50 (nM) |
|---|---|---|
| Z06260-ABD | 1200 | 8 |
| His₆-Z06282 | 1206 | 16 |
| Z06282-ABD | 1206 | 15 |
| His₆-Z06455 | 1214 | 67 |
| Z06455-ABD | 1214 | 15 |

### Example 4

### Design and Construction of a First Maturated Library of IL-17A Binding Z Variants

[0325] In this Example, a maturated library was designed and constructed. The library was used for selection of further IL-17A binding Z variants. Selections from maturated libraries are usually expected to result in binders with increased affinity (Orlova et al., (2006) Cancer Res 66(8):4339-48). In this study, randomized single stranded linkers were generated using split-pool DNA synthesis, enabling incorporation of defined codons in desired positions in the synthesis.

### Materials and Methods

[0326] Library design: The library was based on the sequences of the IL-17A binding Z variants identified as described in Example 1. In the new library, 13 variable positions in the Z molecule scaffold were biased towards certain amino acid residues, according to a strategy based on the Z variant sequences defined in SEQ ID NO:1200-1216. A DNA linker was generated using split-pool synthesis containing the following 147 bp sequence ordered from DNA 2.0 (Menlo Park, Calif., USA): 5′-AA ATA AAT CTC GAG GTA GAT GCC AAA TAC GCC AAA GAA NNN NNN NNN GCG NNN NNN GAG ATC NNN NNN TTA CCT AAC TTA ACC NNN NNN CAA NNN NNN GCC TTC ATC NNN AAA TTA NNN GAT GAC CCA AGC CAG AGC TCA TTA TTT A-3′ (SEQ ID NO:1248; randomized codons are denoted NNN), comprising a coding sequence for a partially randomized helix 1 and 2 in the corresponding amino acid sequence, flanked by restriction sites for XhoI and SacI. The theoretical distributions of amino acid residues in the new library including 13 variable Z positions (9, 10, 11, 13, 14, 17, 18, 24, 25, 27, 28, 32 and 35) in the Z molecule scaffold are given in Table 4. The resulting theoretical library size is 6.1×10⁹ variants.

TABLE 4
Library design, first maturation

| Amino acid | | | |
|---|---|---|---|
| position in | Randomization | No of | |
| the Z variant | (amino acid | amino | |
| molecule | abbreviations) | acids | Proportion |
| 9 | A, H, M, W, Y | 5 | ⅕ |
| 10 | A, D (60%), G, L, N | 5 | 1/10, |
| | | | 6/10 (D) |
| 11 | D, E, F, N, Q R, Y | 7 | 1/7 |
| 13 | A, E, Q, W | 4 | ¼ |
| 14 | F, I, L, M, V, W | 6 | ⅙ |
| 17 | A, F, Q, W | 4 | ¼ |
| 18 | A, D, E, L, M, S, T | 7 | 1/7 |
| 24 | A, H, R, T, W, Y | 6 | ⅙ |
| 25 | A, D, H, R, V | 5 | ⅕ |
| 27 | A, G, Q, R, S, W | 6 | ⅙ |
| 28 | F, H, K, N, R, S, T, V, Y | 9 | 1/9 |
| 32 | A, G, H, I, Q, R, S, V | 8 | ⅛ |
| 35 | I, L, N, R | 4 | ¼ |

[0327] Library construction: The library was amplified using AmpliTaq Gold polymerase (Applied Biosystems, cat. no. 4311816) during 12 cycles of PCR, and pooled products were purified with QIAquick PCR Purification Kit (QIAGEN, cat. no. 28106) according to the supplier's recommendations. The purified pool of randomized library fragments was digested with restriction enzymes XhoI and SacI-HF (New England Biolabs, cat. no. R0146L and cat. no. R3156M, respectively) and concentrated using the QIAquick PCR Purification Kit. Subsequently, the product was subjected to gel electrophoresis using a preparative 2.5% agarose gel (Nuisieve GTC agarose, Cambrex, Invitrogen) and purified from said gel using QIAGEN Gel Extraction Kit (QIAGEN, cat. no. 28706) according to the supplier's recommendations.

[0328] The phagemid vector pAY02592 (essentially as pAffi1 described in Grönwall et al., supra) was restricted with the same enzymes, purified using phenol/chloroform extraction and ethanol precipitation. The restricted fragments and the restricted vector were ligated in a molar ratio of 5:1 with T4 DNA ligase (Fermentas, cat. no. EL0011) for 2 h at RT, followed by overnight incubation at 4° C. The ligated DNA was recovered by phenol/chloroform extraction and ethanol precipitation, followed by dissolution in 10 mM Tris-HCl, pH 8.5. Thus, the resulting library in vector pAY02592 encoded Z variants each fused to an albumin binding domain (ABD) derived from streptococcal Protein G.

[0329] The ligation reactions (approximately 160 ng DNA/transformation) were electroporated into electrocompetent E. coli ER2738 cells (Lucigen, Middleton, Wis., USA, 50 μl). Immediately after electroporation, approximately 1 ml of recovery medium (supplied with E. coli ER2738 cells) was added. The transformed cells were incubated at 37° C. for 60 min. Samples were taken for titration and for determination of the number of transformants. The cells were thereafter pooled and cultivated overnight at 37° C. in 1 l of TSB-YE medium, supplemented with 2% glucose, 10 μg/ml tetracycline and 100 μg/ml ampicillin. The cells were pelleted for 15 min at 4,000 g and resuspended in a PBS/glycerol solution (approximately 40% glycerol). The cells were aliquoted and stored at −80° C. Clones from the library of Z variants were sequenced in order to verify the content and to evaluate the outcome of the constructed library vis-à-vis the library design. Sequencing was performed as described in Example 1 and the amino acid distribution was verified.

[0330] Preparation of phage stock: Phage stock containing the phagemid library was prepared in a 20 l fermenter (Belach Bioteknik). Cells from a glycerol stock containing the phagemid library were inoculated in 10 l of TSB-YE supplemented with 1 g/l glucose, 100 mg/l ampicillin and 10 mg/l tetracycline. When the cells reached an optical density at 600 nm (OD₆₀₀) of 0.52, approximately 1.7 l of the cultivation was infected using a 5× molar excess of M13K07 helper phage. The cells were incubated for 30 min, whereupon the fermenter was filled up to 10 l with complex fermentation medium [2.5 g/l (NH₄)₂SO₄; 5.0 g/l yeast extract; 30 g/l tryptone, 2 g/l K₂HPO₄; 3 g/l KH₂PO₄, 1.25 g/l; Na₃C₆H₅O₇.2 H₂O; Breox FMT30 antifoaming agent 0.1 ml/l]. The following components were added: 10 ml carbenicillin 25 mg/ml; 5 ml kanamycin 50 mg/ml; 1 ml 1 M IPTG; 17.5 ml/l 1.217 M MgSO₄ and 5 ml of a trace element solution [129 mM FeCl₃; 36.7 mM ZnSO₄; 10.6 mM CuSO₄; 78.1 mM MnSO₄; 94.1 mM CaCl₂, dissolved in 1.2 M HCl]. A glucose limited fed-batch cultivation was started where a 600 g/l glucose solution was fed to the reactor (3.5 g/h at the start, 37.5 g/h after 20 h continuing until the end of the cultivation). Through the automatic addition of 25% NH₄OH, the pH was controlled at pH 7. Air was supplemented (5 l/min) and the stirrer was set at 500 rpm. After 24 h of fed-batch cultivation the OD₆₀₀ was 19.4. The cells in the cultivation were pelleted by centrifugation at 15,900 g. The phage particles were precipitated from the supernatant twice in PEG/NaCl, filtered and dissolved in PBS and glycerol as described in Example 1. Phage stocks were stored at −80° C. until use in selection.

### Results

[0331] Library construction: The new library was designed based on a set of IL-17A binding Z variants with verified binding properties (Example 1 and 3). The theoretical size of the designed library was 6.1×10⁹ Z variants. The actual size of the library, determined by titration after transformation to E. coli ER2738 cells, was 4.5×10⁹ transformants.

[0332] The library quality was tested by sequencing of 96 transformants and by comparing their actual sequences with the theoretical design. The contents of the actual library compared to the designed library were shown to be satisfactory. A maturated library of potential binders to IL-17A was thus successfully constructed.

### Example 5

### Selection, Screening and Characterization of Z Variants from the First Maturated Library

### Materials and Methods

[0333] Phage display selection of IL-17A binding Z variants: The target proteins hIL-17A and mIL-17A were biotinylated as described in Example 1. Phage display selections, using the new library of Z variant molecules constructed as described in Example 4, were performed in four cycles against hIL-17A and mIL-17A essentially as described in Example 1, with the following exceptions. Exception 1: PBST 0.1% was used as selection buffer. At selection, fetal calf serum (FCS, Gibco, cat. no. 10108-165) and human serum albumin (HSA, Albucult, Novozymes, cat. no. 230-005) were added to the selection buffer to a final concentration of 10% and 1.5 μM, respectively. Exception 2: a pre-selection step was performed in cycle 1 by incubating the phage stock with SA beads. Exception 3: all tubes and beads used in the selection were pre-blocked with PBS supplemented with 3% BSA and 0.1% Tween20. Exception 4: the time for selection was 140, 70, 60 and 50 min in cycles 1, 2, 3 and 4, respectively.

[0334] An overview of the selection strategy, describing an increased stringency in subsequent cycles obtained by using a lowered target concentration and an increased number of washes, is shown in Table 5.

TABLE 5
Overview of the selection from the first maturated library

| | | Phage stock | | Target | Number | Number | Number of | |
|---|---|---|---|---|---|---|---|---|
| | Selection | from library or | | conc. | of 1 min | of 10 min | overnight | Elution |
| Cycle | track | selection track | Target | (nM) | washes | washes | washes | at |
| 1 | 1 | Zlib006IL- | hIL-17A | 25 | 2 | — | — | pH 5.5 |
| | | 17A.I | | | | | | |
| 1 | 2 | Zlib006IL- | hIL-17A | 12.5 | 3 | — | — | pH 2.2 |
| | | 17A.I | | | | | | |
| 1 | 3 | Zlib006IL- | hIL-17A | 25 | 2 | — | — | pH 2.2 |
| | | 17A.I | | | | | | |
| 2 | 1-1 | 1 | hIL-17A | 12.5 | 6 | — | — | pH 5.5 |
| 2 | 2-1 | 2 | hIL-17A | 2.5 | 10 | — | — | pH 2.2 |
| 2 | 2-2 | 2 | hIL-17A | 5 | 6 | — | — | pH 2.2 |
| 2 | 3-1 | 3 | hIL-17A | 7.5 | 10 | — | — | pH 2.2 |
| 2 | 3-2 | 3 | hIL-17A | 12.5 | 6 | — | — | pH 2.2 |
| 2 | 3-3 | 3 | mIL-17A | 12.5 | 6 | — | — | pH 2.2 |
| 3 | 1-1-1 | 1-1 | hIL-17A | 2.5 | 10 | — | — | pH 5.5 |
| 3 | 2-1-1 | 2-1 | hIL-17A | 0.05 | 15 | 1 | — | pH 2.2 |
| 3 | 2-2-1 | 2-2 | hIL-17A | 0.5 | 15 | 1 | — | pH 2.2 |
| 3 | 3-1-1 | 3-1 | hIL-17A | 0.75 | 15 | 1 | — | pH 2.2 |
| 3 | 3-2-1 | 3-2 | hIL-17A | 2.5 | 10 | — | — | pH 2.2 |
| 3 | 3-3-1 | 3-3 | hIL-17A | 5 | 10 | — | — | pH 2.2 |
| 4 | 1-1-1-1a | 1-1-1 | hIL-17A | 0.05 | 20 | — | — | pH 5.5 |
| 4 | 1-1-1-1b | 1-1-1 | hIL-17A | 0.05 | 20 | — | 1 | pH 5.5 |
| 4 | 1-1-1-2a | 1-1-1 | hIL-17A | 1 | 12 | — | — | pH 5.5 |
| 4 | 1-1-1-2b | 1-1-1 | hIL-17A | 1 | 12 | — | 1 | pH 5.5 |
| 4 | 2-1-1-1a | 2-1-1 | hIL-17A | 0.0025 | 30 | — | — | pH 2.2 |
| 4 | 2-1-1-1b | 2-1-1 | hIL-17A | 0.0025 | 30 | — | 1 | pH 2.2 |
| 4 | 2-1-1-2a | 2-1-1 | hIL-17A | 0.025 | 20 | — | — | pH 2.2 |
| 4 | 2-1-1-2b | 2-1-1 | hIL-17A | 0.025 | 20 | — | 1 | pH 2.2 |
| 4 | 2-2-1-1a | 2-2-1 | hIL-17A | 0.005 | 30 | — | — | pH 2.2 |
| 4 | 2-2-1-1b | 2-2-1 | hIL-17A | 0.005 | 30 | — | 1 | pH 2.2 |
| 4 | 2-2-1-2a | 2-2-1 | hIL-17A | 0.05 | 20 | — | — | pH 2.2 |
| 4 | 2-2-1-2b | 2-2-1 | hIL-17A | 0.05 | 20 | — | 1 | pH 2.2 |
| 4 | 3-1-1-1a | 3-1-1 | hIL-17A | 0.025 | 30 | — | — | pH 2.2 |
| 4 | 3-1-1-1b | 3-1-1 | hIL-17A | 0.025 | 30 | — | 1 | pH 2.2 |
| 4 | 3-1-1-2a | 3-1-1 | hIL-17A | 0.25 | 20 | — | — | pH 2.2 |
| 4 | 3-1-1-2b | 3-1-1 | hIL-17A | 0.25 | 20 | — | 1 | pH 2.2 |
| 4 | 3-2-1-1a | 3-2-1 | hIL-17A | 0.05 | 20 | — | — | pH 2.2 |
| 4 | 3-2-1-1b | 3-2-1 | hIL-17A | 0.05 | 20 | — | 1 | pH 2.2 |
| 4 | 3-2-1-2a | 3-2-1 | hIL-17A | 1 | 12 | — | — | pH 2.2 |
| 4 | 3-2-1-2b | 3-2-1 | hIL-17A | 1 | 12 | — | 1 | pH 2.2 |
| 4 | 3-3-1-1a | 3-3-1 | mIL-17A | 0.05 | 20 | — | — | pH 2.2 |
| 4 | 3-3-1-1b | 3-3-1 | mIL-17A | 0.05 | 20 | — | 1 | pH 2.2 |
| 4 | 3-3-1-2a | 3-3-1 | mIL-17A | 1 | 15 | — | — | pH 2.2 |
| 4 | 3-3-1-2b | 3-3-1 | mIL-17A | 1 | 15 | — | 1 | pH 2.2 |

[0335] Tracks 1-3 in cycle 1 were split in the second to fourth cycles, resulting in a total of six tracks (1-1 to 3-3) in cycle 2, six tracks (1-1-1 to 3-3-1) in cycle 3 and 24 tracks (1-1-1-1 a to 3-3-1-2b) in cycle 4. Washes were performed using PBST 0.1% for 1 min. However, for track 1-3 in cycle 3, one of the washes lasted for 10 min.

[0336] After the last wash in cycle 4, the target-phage complexes on SA beads from all tracks were divided in two equal parts. Bound phage particles from the first part were immediately eluted, while the second part was subjected to an overnight wash before elution of phage particles. The bound phage particles were eluted using two different procedures: 1) with glycine-HCl, pH 2.2, as in Example 1, or 2) 500 μl of 100 mM sodium phosphate, 150 mM sodium chloride, pH 5.5 and neutralization with 500 μl PBS.

[0337] Amplification of phage particles: Amplification of phage particles between selection cycle 1 and 2 was performed essentially as described in Example 1, with the following three exceptions. Exception 1: E. coli ER2738 was used for phage amplification. Exception 2: M13K07 helper phage were used in 5× excess. Exception 3: the amplification of phage particles between the selection cycles 2 and 4 was performed as follows: after infection of log phase E. coli ER2738 with phage particles, TSB supplemented with 2 glucose, 10 μg/ml tetracycline and 100 μg/ml ampicillin was added and followed by incubation with rotation for 30 min at 37° C. Next, the bacteria were infected with M13K07 helper phage. The infected bacteria were pelleted by centrifugation, re-suspended in TSB-YE medium supplemented with 100 μM IPTG, 25 μg/ml kanamycin and 100 μg/ml ampicillin, and grown overnight at 30° C. The overnight cultures were centrifuged, and phage particles in the supernatant were precipitated twice with PEG/NaCl buffer. Lastly, phages were re-suspended in selection buffer before entering the next selection cycle.

[0338] In the final selection cycle, log phase bacteria were infected with eluate and diluted before spreading onto TBAB plates (30 g/l tryptose blood agar base, Oxoid cat. no. CM0233B) supplemented with 0.2 g/l ampicillin in order to form single colonies to be used in ELISA screening.

[0339] Sequencing of potential binders: Individual clones from the different selection tracks were picked for sequencing. Amplification of gene fragments and sequence analysis of gene fragments were performed essentially as described in Example 1.

[0340] ELISA screening of Z variants: Single colonies containing Z variants (expressed as Z variant ABD fusion proteins as described in Example 1) were randomly picked from the selected clones of the maturated library, and grown in cultivations essentially as described in Example 1. Preparation of the periplasmic supernatants and ELISA screenings were also performed essentially as described in Example 1 with the following two exceptions. Exception 1: biotinylated hIL-17A was used at a concentration of 0.4 nM. Exception 2: the periplasmic fraction of Z variant Z06282 (SEQ ID NO:1206) from the primary selection was used as a positive control.

[0341] EC50 analysis of Z variants: A selection of IL-17A binding Z variants was subjected to an analysis of response against a dilution series of b-hIL-17A using ELISA as described above. Biotinylated target protein was added at a concentration of 6 nM and diluted stepwise 1:3 down to 8 pM. As a background control, the Z variants were also assayed with no target protein added. Periplasm samples containing the primary IL-17A binder Z06282 (SEQ ID NO:1206) were included as a positive control. Data were analyzed using GraphPad Prism 5 and non-linear regression, and EC50 values (the half maximal effective concentration) were calculated.

### Results

[0342] Phage display selection of maturated IL-17A binding Z variants: Selection was performed in a total of 24 parallel tracks containing four cycles each. The different selection tracks differed in target concentration, target species origin (human IL-17A or murine IL-17A), selection time, wash conditions and the pH of the elution buffer. Clones originating from the selection tracks using only human IL-17 and elution at pH 2.2 were shown to have the best performance in ELISA screen.

[0343] Sequencing: Randomly picked clones were sequenced. Each individual Z variant was given an identification number, Z#####, as described in Example 1. In total, 932 new unique Z variant molecules were identified. For the 494 best performing variants in the ELISA screen below, the amino acid sequences of the 58 amino acid residues long Z variants are listed in FIG. 1 as SEQ ID NO:1-3, SEQ ID NO:11-16, SEQ ID NO:28-31, SEQ ID NO:36-63 and SEQ ID NO:67-519. The deduced IL-17A binding motifs extend from residue 8 to residue 36 in each sequence. The amino acid sequences of the 49 amino acid residues long polypeptides predicted to constitute the complete three-helix bundle within each of these Z variants extend from residue 7 to residue 55.

[0344] ELISA screening of Z variants: Clones obtained after four selection cycles were produced in 96-well plates and screened for human IL-17A binding activity using ELISA. All randomly picked clones were analyzed. 494 of the 932 unique Z variants were found to give a response of 2× the blank control or higher (0.15-2.0 AU) against hIL-17A at a concentration of 0.4 nM. Positive signals were shown for clones originating from all selection tracks. The blank controls had absorbances of 0.055-0.075 AU.

[0345] EC50 analysis of Z variants: A subset of Z variants was selected based on the result of the ELISA screening experiment described above (absorbance over 1.25 AU) or based on variation in amino acid sequence, and subjected to a target titration in ELISA format. Periplasm samples were incubated with a serial dilution of b-hIL-17A ranging from 6 nM to 8 pM. A periplasm sample containing Z06282 (SEQ ID NO:1206) identified in the primary selection was included as a positive control. Obtained values were analyzed and the respective EC50 values were calculated (Table 6).

TABLE 6
Calculated EC50 values from ELISA titration analysis

| | SEQ | EC50 |
|---|---|---|
| Z variant | ID NO | (M) |
| Z10210 | 36 | 1.1 × 10⁻⁹ |
| Z10241 | 11 | 3.4 × 10⁻¹⁰ |
| Z10255 | 37 | 4.6 × 10⁻¹⁰ |
| Z10257 | 38 | 6.7 × 10⁻¹⁰ |
| Z10433 | 28 | 9.4 × 10⁻¹⁰ |
| Z10459 | 39 | 4.7 × 10⁻¹⁰ |
| Z10462 | 12 | 3.4 × 10⁻¹⁰ |
| Z10465 | 40 | 5.0 × 10⁻¹⁰ |
| Z10470 | 41 | 4.7 × 10⁻¹⁰ |
| Z10483 | 42 | 4.0 × 10⁻¹⁰ |
| Z10508 | 2 | 3.8 × 10⁻¹⁰ |
| Z10529 | 43 | 6.4 × 10⁻¹⁰ |
| Z10532 | 1 | 3.6 × 10⁻¹⁰ |
| Z10534 | 13 | 4.1 × 10⁻¹⁰ |
| Z10550 | 44 | 7.9 × 10⁻¹⁰ |
| Z10565 | 45 | 3.8 × 10⁻¹⁰ |
| Z10566 | 14 | 5.5 × 10⁻¹⁰ |
| Z10675 | 15 | 3.6 × 10⁻¹⁰ |
| Z10676 | 46 | 4.0 × 10⁻¹⁰ |
| Z10690 | 47 | 5.9 × 10⁻¹⁰ |
| Z10703 | 48 | 7.5 × 10⁻¹⁰ |
| Z10708 | 49 | 4.1 × 10⁻¹⁰ |
| Z10710 | 50 | 5.4 × 10⁻¹⁰ |
| Z10718 | 16 | 5.1 × 10⁻¹⁰ |
| Z10728 | 51 | 5.3 × 10⁻¹⁰ |
| Z10745 | 52 | 6.8 × 10⁻¹⁰ |
| Z10756 | 53 | 6.4 × 10⁻¹⁰ |
| Z10759 | 54 | 6.7 × 10⁻¹⁰ |
| Z10775 | 55 | 5.1 × 10⁻¹⁰ |
| Z10778 | 56 | 4.7 × 10⁻¹⁰ |
| Z10779 | 57 | 5.7 × 10⁻¹⁰ |
| Z10800 | 58 | 6.4 × 10⁻¹⁰ |
| Z10807 | 59 | 6.0 × 10⁻¹⁰ |
| Z10844 | 60 | 7.5 × 10⁻¹⁰ |
| Z10857 | 61 | 4.5 × 10⁻¹⁰ |
| Z10858 | 62 | 5.2 × 10⁻¹⁰ |
| Z10859 | 31 | 6.9 × 10⁻¹⁰ |
| Z10863 | 3 | 4.5 × 10⁻¹⁰ |
| Z10914 | 63 | 5.1 × 10⁻¹⁰ |
| Z06282 | 1206 | 5.0 × 10⁻⁹ |

### Example 6

### Design and Construction of a Second Maturated Library of IL-17A Binding Z Variants

[0346] In this Example, a second maturated library was constructed essentially as described in Example 4. The library was used for selections of additional IL-17A binding Z variants.

### Materials and Methods

[0347] Library design: The library was based on the sequences of IL-17A binding Z variants selected and characterized in Example 5. In the new library, the 13 positions in the Z molecule scaffold that were varied in the maturation library described in Examples 4 and 5 were biased towards certain amino acid residues, according to a strategy based on the Z variant sequences of the 37 top performing variants in the EC50 analysis (Table 6). A DNA linker was generated using split-pool synthesis and ordered from DNA 2.0. It contained the following 147 bp, encoding partially randomized helix 1 and 2 of the amino acid sequence: 5′-AA ATA AAT CTC GAG GTA GAT GCC/GCA AAA TAC GCC AAA GAA/GAG NNN NNN NNN GCG NNN NNN GAG ATC/ATT NNN NNN TTA/CTG CCT/CCC AAC TTA/CTC ACC NNN NNN CAA/CAG NNN NNN GCC TTC ATC NNN AAA TTA NNN GAT GAC CCA AGC CAG AGC TCA TTA TTT A-3′ (SEQ ID NO:1249; randomized codons are denoted NNN) flanked by restriction sites XhoI and SacI. The theoretical distributions of amino acid residues in the new library, including six variable amino acid positions (11, 14, 18, 25, 28 and 32) and seven constant amino acid positions (9, 10, 13, 17, 24, 27 and 35) in the Z molecule scaffold are given in Table 7. The resulting theoretical library size is 3.9×10⁶ variants.

[0348] Library construction: The library was constructed essentially as described in Example 4 with the following exception: the cells were cultivated overnight in 0.5 l of TSB-YE medium, supplemented with 2% glucose, 10 μg/ml tetracycline and 100 μg/ml ampicillin.

[0349] Preparation of phage stock: Phage stock containing the phagemid library was prepared in shake flasks. Cells from a glycerol stock containing the phagemid library were inoculated in 0.5 l of TSB-YE medium, supplemented with 2% glucose, 10 μg/ml tetracycline and 100 μg/ml ampicillin. The cultivations were grown at 37° C. until OD₆₀₀ reached 0.6 and then approximately 83 ml of the cultivation was infected using a 5× molar excess of M13K07 helper phage and incubated for 40 min at 37° C. The cells in the cultivation were pelleted by centrifugation, dissolved in TSB-YE medium, supplemented with 100 μg/ml ampicillin, 25 μg/ml kanamycin and 0.1 mM IPTG and grown at 30° C. for 18 h. After cultivation, the cells were pelleted by centrifugation at 4,000 g and the phage particles remaining in the medium were thereafter precipitated twice in PEG/NaCl, filtered and dissolved in PBS and glycerol as described in Example 1. Phage stocks were stored at −80° C. until use in selection.

TABLE 7
Library design, second maturation

| Amino acid | | | |
|---|---|---|---|
| position in | Randomization | No of | |
| the Z variant | (amino acid | amino | |
| molecule | abbreviations) | acids | Proportion |
| 9 | A | 1 | 1/1 |
| 10 | D | 1 | 1/1 |
| 11 | A, D, E, F, G, H, I, K, L, M, | 17 | 1/17 |
| | N, Q, R, S, T V, W | | |
| 13 | A | 1 | 1/1 |
| 14 | A, F, I, L, M, V, Y | 7 | 1/7 |
| 17 | A | 1 | 1/1 |
| 18 | A, D, E, F, G, H, I, K, L, M, | 17 | 1/17 |
| | N, Q, R, S, V, W, Y | | |
| 24 | W | 1 | 1/1 |
| 25 | A, D (50%), E, F, I, L, M, V, | 10 | 1/18, |
| | W, Y | | ½ (0) |
| 27 | W | 1 | 1/1 |
| 28 | A, D, E, F, G, H, I, L, M, Q, | 12 | 1/12 |
| | W, Y | | |
| 32 | A, D, E, F, G, H, K, L, M, N, | 16 | 1/16 |
| | Q, R, S, T, W, Y | | |
| 35 | R | 1 | 1/1 |

### Results

[0350] Library construction: The new library was designed based on a set of IL-17A binding Z variants with verified binding properties (Example 5). The theoretical size of the designed library was 3.9×10⁶ Z variants. The actual size of the library, determined by titration after transformation to E. coli. ER2738 cells, was 1.4×10⁹ transformants.

[0351] The library quality was tested by sequencing of 96 transformants and by comparing their actual sequences with the theoretical design. The contents of the actual library compared to the designed library were shown to be satisfactory. A maturated library of potential binders to IL-17A was thus successfully constructed.

### Example 7

### Selection, Screening and Characterization of Z Variants from the Second Maturated Library

### Materials and Methods

[0352] Phage display selection of IL-17A binding Z variants: The target protein hIL-17A was biotinylated as described in Example 1. Phage display selections, using the second maturated library of Z variant molecules constructed as described in Example 6, were performed against hIL-17A essentially as described in Example 5 with the following exceptions. Exception 1: selections were performed in solution or at solid phase in RT. Exception 2: the time for selection was 60 min, 10 min or 1 min in cycle 1 and 30 min, 4 min or 10 sec in cycles 2, 3 and 4. Selection in solution was followed by catching of target-phage complexes on SA beads as described in Example 1. Exception 3: during selection on solid phase, the target was caught on SA beads prior to selection.

[0353] An overview of the selection strategy, summarizing the differences between selection in solution and selection on solid phase, as well as the increased stringency in subsequent cycles obtained by using a lowered target concentration and an increased number of washes, is shown in Table 8.

[0354] Tracks 1-6 in cycle 1 were divided in the second to fourth cycles, resulting in total of seven tracks (1-1 to 6-1) in cycle 2, eight tracks (1-1-1 to 6-1-1) in cycle 3 and 16 tracks (1-1-1-1 to 6-1-1-1) in cycle 4. Washes were performed using PBST 0.1% during 1 min. However, one of the washes lasted for 15 min in tracks 2-1-1, 3-1-1 and 5-1-1 in cycle 3.

[0355] After the last wash in cycle 4, the target-phage complexes on SA beads from five of the tracks (1-1-1-1, 1-2-1-2, 3-1-1-1, 4-1-1-1 and 5-1-1-2) were divided in two equal parts. Bound phage particles from the first part were immediately eluted, while the second part was subjected to a wash during approximately 65 h before the elution of phage particles. The bound phage were eluted using glycine-HCl, pH 2.2, as described in Example 1.

[0356] The amplification of phage particles between selection cycles was performed essentially as described in Example 1.

TABLE 8
Overview of the selection from the second maturated library

| | | Phage stock | Target | Selection | Number | Number | Number | |
|---|---|---|---|---|---|---|---|---|
| | Selection | from library or | conc. | time | of 1 min | of 15 min | of ~65 h | Selection |
| Cycle | track | selection track | (pM) | (min) | washes | washes | washes | method |
| 1 | 1 | Zlib006IL- | 12500 | 60 | 3 | — | — | solution |
| | | 17A.II | | | | | | |
| 1 | 2 | Zlib006IL- | 12500 | 60 | 3 | — | — | solution |
| | | 17A.II | | | | | | |
| 1 | 3 | Zlib006IL- | 1250 | 60 | 3 | — | — | solution |
| | | 17A.II | | | | | | |
| 1 | 4 | Zlib006IL- | 12500 | 10 | 3 | — | — | solid |
| | | 17A.II | | | | | | phase |
| 1 | 5 | Zlib006IL- | 2500 | 10 | 3 | — | — | solid |
| | | 17A.II | | | | | | phase |
| 1 | 6 | Zlib006IL- | 2500 | 1 | 3 | — | — | solid |
| | | 17A.II | | | | | | phase |
| 2 | 1-1 | 1 | 5000 | 30 | 6 | — | — | solution |
| 2 | 1-2 | 1 | 2500 | 30 | 10 | — | — | solution |
| 2 | 2-1 | 2 | 1000 | 30 | 10 | — | — | solution |
| 2 | 3-1 | 3 | 100 | 30 | 10 | — | — | solution |
| 2 | 4-1 | 4 | 5000 | 4 | 6 | — | — | solid |
| | | | | | | | | phase |
| 2 | 5-1 | 5 | 250 | 4 | 10 | — | — | solid |
| | | | | | | | | phase |
| 2 | 6-1 | 6 | 250 | 0.17 | 10 | — | — | solid |
| | | | | | | | | phase |
| 3 | 1-1-1 | 1-1 | 500 | 30 | 15 | — | — | solution |
| 3 | 1-2-1 | 1-2 | 50 | 30 | 15 | — | — | solution |
| 3 | 2-1-1 | 2-1 | 25 | 30 | 14 | 1 | — | solution |
| 3 | 3-1-1 | 3-1 | 5 | 30 | 14 | 1 | — | solution |
| 3 | 4-1-1 | 4-1 | 500 | 4 | 15 | — | — | solid |
| | | | | | | | | phase |
| 3 | 4-1-2 | 4-1 | 50 | 4 | 15 | — | — | solid |
| | | | | | | | | phase |
| 3 | 5-1-1 | 5-1 | 25 | 4 | 14 | 1 | — | solid |
| | | | | | | | | phase |
| 3 | 6-1-1 | 6-1 | 5 | 0.17 | 15 | — | — | solid |
| | | | | | | | | phase |
| 4 | 1-1-1-1 | 1-1-1 | 50 | 30 | 20 | — | — | solution |
| 4 | 1-1-1-1X | 1-1-1 | 50 | 30 | 20 | — | 1 | solution |
| 4 | 1-1-1-2 | 1-1-1 | 5 | 30 | 20 | — | — | solution |
| 4 | 1-2-1-1 | 1-2-1 | 25 | 30 | 20 | — | — | solution |
| 4 | 1-2-1-2 | 1-2-1 | 5 | 30 | 20 | — | — | solution |
| 4 | 1-2-1-2X | 1-2-1 | 5 | 30 | 20 | — | 1 | solution |
| 4 | 2-1-1-1 | 2-1-1 | 0.5 | 30 | 20 | — | — | solution |
| 4 | 3-1-1-1 | 3-1-1 | 0.05 | 30 | 20 | — | — | solution |
| 4 | 3-1-1-1X | 3-1-1 | 0.05 | 30 | 20 | — | 1 | solution |
| 4 | 4-1-1-1 | 4-1-1 | 50 | 4 | 20 | — | — | solid |
| | | | | | | | | phase |
| 4 | 4-1-1-1X | 4-1-1 | 50 | 4 | 20 | — | 1 | solid |
| | | | | | | | | phase |
| 4 | 4-1-2-1 | 4-1-2 | 25 | 4 | 20 | — | — | solid |
| | | | | | | | | phase |
| 4 | 5-1-1-1 | 5-1-1 | 2.5 | 4 | 20 | — | | solid |
| | | | | | | | | phase |
| 4 | 5-1-1-2 | 5-1-1 | 0.5 | 4 | 20 | — | — | solid |
| | | | | | | | | phase |
| 4 | 5-1-1-2X | 5-1-1 | 0.5 | 4 | 20 | — | 1 | solid |
| | | | | | | | | phase |
| 4 | 6-1-1-1 | 6-1-1 | 0.5 | 0.17 | 20 | — | — | solid |
| | | | | | | | | phase |

[0357] Sequencing of potential binders: Individual clones from the different selection tracks were picked for sequencing. Amplification and sequence analysis of gene fragments were performed essentially as described in Example 1.

[0358] ELISA screening of Z variants: Single colonies containing Z variants (expressed as Z variant ABD fusion proteins as described in Example 1) were randomly picked from the selected clones of the IL-17A second maturated library and grown in cultivations as described in Example 1. Preparation of the periplasmic supernatants and ELISA screenings were performed essentially as described in Example 1 with the following two exceptions. Exception 1: biotinylated hIL-17A was used at a concentration of 0.2 or 0.33 nM. Exception 2: the periplasmic fraction of Z variant Z10241 (SEQ ID NO:11), identified in selections from the first maturated library, was used as a positive control and the blank control was created by exchanging the periplasmic step with addition of PBST 0.05%.

[0359] EC50 analysis of Z variants: A selection of IL-17A binding Z variants was subjected to an analysis of the response against a dilution series of b-hIL-17A using ELISA as described in Example 5. Biotinylated protein was added at a concentration of 10 nM and diluted stepwise 1:2 eight times followed by one 1:5 dilution down to 8 pM. As a background control, the Z variants were also assayed with no target protein added. A periplasm sample containing the previously maturated Z variant Z10241 (SEQ ID NO:11) was included as positive control. Data were analyzed using GraphPad Prism 5 and non-linear regression and EC50 values were calculated.

### Results

[0360] Phage display selection of IL-17A binding Z variants from a second maturated library: Selection was performed in a total of 16 parallel tracks containing four cycles each. The selection tracks differed in target concentration, selection time, wash conditions and if the selection was performed in solution or on solid phase.

[0361] Sequencing: Randomly picked clones were sequenced. Each individual Z variant was given an identification number, Z#####, as described in Example 1. In total, 759 new unique Z variant molecules were identified.

[0362] For the 704 best performing variants in the ELISA screen below, the amino acid sequences of the 58 amino acid residues long Z variants are listed in FIG. 1 and in the sequence listing as SEQ ID NO:5-10, SEQ ID NO:17-27, SEQ ID NO:32-35, SEQ ID NO:64-66 and SEQ ID NO:520-1199. The deduced IL-17A binding motifs extend from residue 8 to residue 36 in each sequence. The amino acid sequences of the 49 amino acid residues long polypeptides predicted to constitute the complete three-helix bundle within each of these Z variants extend from residue 7 to residue 55.

[0363] ELISA screening of Z variants: Clones obtained after four selection cycles were produced in 96-well plates and screened for hIL-17A binding activity using ELISA. All randomly picked clones were analyzed. 704 of the 759 unique Z variants were found to give a response of 2× the blank controls or higher (0.22-2.2 AU) against hIL-17A at a concentration of 0.2 or 0.33 nM. Positive signals were collected for clones originating from all selection tracks. The average response of the blank controls was 0.11 AU, based on a representative set of plates.

[0364] EC50 analysis of Z variants: A subset of IL-17A binding Z variants was selected based on the result in the ELISA experiment described above (Z variants with absorbances over the response of the positive control Z10241, SEQ ID NO:11) and subjected to a target titration in ELISA format as described in Example 5. Obtained values were analyzed and their respective EC50 values were calculated (Table 9).

TABLE 9
Calculated EC50 values from ELISA titration analysis

| | SEQ | EC50 |
|---|---|---|
| Z variant | ID NO | (M) |
| Z12059 | 17 | 5.3 × 10⁻¹⁰ |
| Z12060 | 5 | 5.1 × 10⁻¹⁰ |
| Z12073 | 18 | 4.3 × 10⁻¹⁰ |
| Z12078 | 8 | 5.2 × 10⁻¹⁰ |
| Z12081 | 6 | 5.6 × 10⁻¹⁰ |
| Z12115 | 20 | 4.2 × 10⁻¹⁰ |
| Z12163 | 9 | 5.0 × 10⁻¹⁰ |
| Z12180 | 21 | 3.7 × 10⁻¹⁰ |
| Z12211 | 22 | 4.6 × 10⁻¹⁰ |
| Z12212 | 64 | 7.8 × 10⁻¹⁰ |
| Z12256 | 23 | 4.7 × 10⁻¹⁰ |
| Z12264 | 10 | 3.9 × 10⁻¹⁰ |
| Z12275 | 24 | 4.2 × 10⁻¹⁰ |
| Z12285 | 65 | 9.1 × 10⁻¹⁰ |
| Z12439 | 66 | 6.1 × 10⁻¹⁰ |

### Example 8

### In Vitro Characterization of a Subset of Maturated IL-17A Binding Z Variants

### Materials and Methods

[0365] Subcloning and production of Z variants with an N-terminal His₆-tag were performed as described in Example 2. One additional variant, His₆-Z15167 (SEQ ID NO:4), was created by site directed mutagenesis of His₆-Z10532 (SEQ ID NO:1) resulting in substitution of D in position 25 with A. Production of His₆-Z15167 was performed as described above for other Z variants.

[0366] Circular dichroism (CD) spectroscopy analysis: Purified His₆-tagged Z variants were diluted to 0.5 mg/ml in PBS. For each diluted Z variant, a CD spectrum at 250-195 nm was obtained at 20° C. In addition, a variable temperature measurement (VTM) was performed to determine the melting temperature (Tm). In the VTM, the absorbance was measured at 221 nm while the temperature was raised from 20 to 90° C., with a temperature slope of 5° C./min. A new CD spectrum was obtained at 20° C. after the heating procedure in order to study the refolding ability of the Z variants. The CD measurements were performed on a Jasco J-810 spectropolarimeter (Jasco Scandinavia AB) using a cell with an optical path length of 1 mm.

[0367] IL-17 binding ELISA screening: 96-well half area plates (Costar, 3690) were coated overnight at 4° C. with hIL-17A at 1 μg/ml in PBS in a volume of 50 μl/well. On the day of analysis, the plate was rinsed twice in tap water and then blocked with PBS+2% BSA (Sigma) for 2 h. Z10241 (SEQ ID NO:11) was used as a standard and was titrated in a 3-fold dilution series (300-0.005 ng/ml) and the other Z variants were added in four different dilutions to the coated ELISA plate (50 μl/well) and incubated for 1.5 h at RT. The plate was washed 4 times in an automated ELISA washer and 2 μg/ml (50 μl/well) of a goat anti-Z antibody was added. After 1 h of incubation, the plate was washed and 50 μl of anti-goat IgG-HRP (DAKO) diluted 5000 times was added per well. The plate was developed after another 1 h incubation, washed with 50 μl TMB (Thermo Fisher, 34021) per well and the reaction was stopped with 50 μl 2 M H₂SO₄. The plates were read in a multi label reader (Victor³, Perkin Elmer).

[0368] Biacore kinetic analysis: Kinetic constants (kₒₙ and k_{off}) and affinities (K_{D}) for human IL-17A were determined for 27 His₆-tagged Z variants. The hIL-17A was immobilized in the flow cell on the carboxylated dextran layer of a CM5 chip surface (GE Healthcare, cat. no. BR100012). The immobilization was performed using amine coupling chemistry according to the manufacturer's protocol and using HBS-EP (0.01 M HEPES pH 7.4, 0.15 M NaCl, 3 mM EDTA, 0.005% v/v surfactant P20, GE Healthcare, cat. no. BR100188) as running buffer. One flow cell surface on the chip was activated and deactivated for use as blank during analyte injections. In the kinetic experiment, HBS-EP was used as running buffer and the flow rate was 50 μl/min. The analytes, i.e. the Z variants, were each diluted in HBS-EP buffer to final concentrations of 100 nM, 20 nM and 4 nM and injected for 4 min, followed by dissociation in running buffer for 8 min. After 8 min dissociation, the surfaces were regenerated with two injections of 10 mM HCl. Kinetic constants were calculated from the sensorgrams using the Langmuir 1:1 model of BiaEvaluation software 4.1 (GE Healthcare).

[0369] Biacore binding specificity analysis: The interactions of three His₆-tagged IL-17A binding Z variants (Z10508 (SEQ ID NO:2), Z10532 (SEQ ID NO:1) and Z15167 (SEQ ID NO:4)) with hIL-17A (SEQ ID NO:1226), hIL-17F (SEQ ID NO:1228; R&D Systems, cat. no. 1335-IL/CF) and the human IL-17A/F heterodimer (R&D Systems, cat. no. 5194-IL-025/CF) were analyzed in a Biacore 2000 instrument. The three different IL-17 variants were immobilized in the flow cells on the carboxylated dextran layer of a CM5 chip surface. The immobilization was performed using amine coupling chemistry according to the manufacturer's protocol and using HBS-EP as running buffer. One flow cell surface on the chip was activated and deactivated for use as blank during analyte injections. In the binding experiment, HBS-EP was used as running buffer and the flow rate was 50 μl/min. The analytes, i.e. the Z variants, were each diluted in HBS-EP running buffer to final concentrations of 4, 20, 100 and 500 nM and injected for 4 min. After 15 min of dissociation, the surfaces were regenerated with four injections of 10 mM HCl. The results were analyzed using the BiaEvaluation software.

[0370] Blocking of IL-17A induced IL-6 production in the NHDF assay: The NHDF assay and quantification by the IL-6 specific ELISA was performed essentially as described in Example 3. In brief, on the day before the experiment, 5000 cells were seeded per well into a half area 96-well culture plates in 100 μl. On the day of the experiment, dilutions of 36 IL-17A specific Z variants were prepared in a separate 96-well plate. The Z variants were titrated in three-fold steps from 4690 nM to 0.08 nM in medium containing 0.9 nM hIL-17A. A standard curve of hIL-17A (6.2-0.0001 nM) was prepared, as well as controls containing medium with 0.9 nM hIL-17A or medium alone.

### Results

[0371] CD analysis: The CD spectra determined for the IL-17A binding Z variants with a His₆ tag showed that each had a a-helical structure at 20° C. The results of the variable temperature measurements, wherein melting temperatures (Tm) were determined, are shown in Table 10. Reversible folding was seen for all the IL-17A binding Z variants when overlaying spectra measured before and after heating to 90° C.

[0372] Analysis of IL-17A binding capacity by ELISA: Purified His₆-tagged Z variant molecules from the first and second maturation round were screened for their capacity to bind IL-17A in an ELISA assay. The results are shown in FIG. 3 as percent binding capacity compared to the variant Z10241.

[0373] Biacore kinetic analysis: The interactions of 28 His₆-tagged IL-17A-binding Z variants with hIL-17A were analyzed in a Biacore instrument by injecting various concentrations of the Z variants over a surface containing immobilized IL-17A. A summary of the kinetic parameters (K_{D}, kₐ (kₒₙ) and k_{d} (k_{off})) for binding of the Z variants to hIL-17A using a 1:1 interaction model is given in Table 11.

TABLE 10
Melting temperatures (Tm)

| | SEQ ID NO | |
|---|---|---|
| Analyte | of Z variant | Tm (° C.) |
| His6-Z10241 | 11 | 48 |
| His6-Z10433 | 28 | 56 |
| His6-Z10462 | 12 | 51 |
| His6-Z10508 | 2 | 54 |
| His6-Z10532 | 1 | 57 |
| His6-Z10534 | 13 | 41 |
| His6-Z10566 | 14 | 51 |
| His6-Z10675 | 15 | 52 |
| His6-Z10681 | 29 | 52 |
| His6-Z10718 | 16 | 48 |
| His6-Z10722 | 30 | 51 |
| His6-Z10859 | 31 | 52 |
| His6-Z10863 | 3 | 51 |
| His6-Z12059 | 17 | 50 |
| His6-Z12060 | 5 | 52 |
| His6-Z12073 | 18 | 49 |
| His6-Z12077 | 19 | 52 |
| His6-Z12078 | 8 | 51 |
| His6-Z12081 | 6 | 50 |
| His6-Z12115 | 20 | 51 |
| His6-Z12163 | 9 | 54 |
| His6-Z12180 | 21 | 51 |
| His6-Z12192 | 32 | 45 |
| His6-Z12211 | 22 | 49 |
| His6-Z12256 | 23 | 47 |
| His6-Z12264 | 10 | 54 |
| His6-Z12275 | 24 | 46 |
| His6-Z12283 | 25 | 45 |
| His6-Z12289 | 33 | 51 |
| His6-Z12344 | 26 | 49 |
| His6-Z12481 | 27 | 49 |
| His6-Z12498 | 34 | 48 |
| His6-Z12522 | 35 | 51 |
| His6-Z12634 | 7 | 50 |
| Z10241-His6 | 11 | 47 |
| His6-Z15167 | 4 | 57 |
| Z10199 | 1217 | 56 |

[0374] Biacore binding specificity analysis: The binding of three His₆-tagged IL-17A binding Z variants (Z10508, Z10532 and Z15167) to hIL-17A, hIL-17F and hIL-17A/F were tested in a Biacore instrument by injecting the Z variants over surfaces containing the IL-17 variants. The ligand immobilization levels on the surfaces were 657 RU, 977 RU and 770 RU of IL-17A, IL-17F and IL-17A/F, respectively. All tested Z variants showed binding to human IL-17A and weaker binding to IL-17A/F, whereas no binding to IL-17F could be detected. The resulting curves, from which responses from a blank surface were subtracted, are displayed in FIG. 4. Z15167 showed the fastest association curve to human IL-17A.

[0375] Blocking of IL-17A induced IL-6 production in the NHDF assay: Purified His₆-tagged Z variants from the first and second maturation rounds were screened for their capacity to block IL-17A induced IL-6 production in the NHDF assay. Results from the NHDF assay showed that all tested maturated binders had an increased IL-17A specific blocking capacity compared to the primary binder His₆-Z06282. A graph displaying typical inhibition profiles of a selection of binders from the first maturation library are shown in FIG. 5, and the calculated IC50 values for all analysed binders are shown in Table 12.

TABLE 11
Kinetic parameters for binding of Z variants to hIL-17A

| | SEQ ID NO | | | |
|---|---|---|---|---|
| Analyte | of Z variant | kₐ (1/Ms) | k_{d} (1/s) | K_{D} (M) |
| His6-Z10241 | 11 | 5.2 × 10⁵ | 1.2 × 10⁻³ | 2.2 × 10⁻⁹ |
| His6-Z10433 | 28 | 4.7 × 10⁵ | 3.1 × 10⁻³ | 6.4 × 10⁻⁹ |
| His6-Z10508 | 2 | 5.1 × 10⁵ | 2.0 × 10⁻³ | 4.0 × 10⁻⁹ |
| His6-Z10532 | 1 | 6.2 × 10⁵ | 1.5 × 10⁻³ | 2.4 × 10⁻⁹ |
| His6-Z10566 | 14 | 6.1 × 10⁵ | 5.7 × 10⁻³ | 9.3 × 10⁻⁹ |
| His6-Z10675 | 15 | 5.7 × 10⁵ | 1.1 × 10⁻³ | 1.9 × 10⁻⁹ |
| His6-Z10681 | 29 | 6.7 × 10⁵ | 3.5 × 10⁻³ | 5.2 × 10⁻⁹ |
| His6-Z10859 | 31 | 5.6 × 10⁵ | 6.8 × 10⁻³ | 1.2 × 10⁻⁸ |
| His6-Z10863 | 3 | 8.3 × 10⁵ | 2.5 × 10⁻³ | 3.0 × 10⁻⁹ |
| His6-Z12060 | 5 | 7.5 × 10⁵ | 3.3 × 10⁻³ | 4.3 × 10⁻⁹ |
| His6-Z12073 | 18 | 4.9 × 10⁵ | 1.2 × 10⁻³ | 2.3 × 10⁻⁹ |
| His6-Z12077 | 19 | 6.5 × 10⁵ | 2.0 × 10⁻³ | 3.1 × 10⁻⁹ |
| His6-Z12078 | 8 | 4.5 × 10⁵ | 8.1 × 10⁻⁴ | 1.8 × 10⁻⁹ |
| His6-Z12081 | 6 | 6.2 × 10⁵ | 3.8 × 10⁻³ | 6.2 × 10⁻⁹ |
| His6-Z12163 | 9 | 7.3 × 10⁵ | 1.6 × 10⁻³ | 2.2 × 10⁻⁹ |
| His6-Z12192 | 32 | 4.6 × 10⁵ | 5.6 × 10⁻³ | 1.2 × 10⁻⁸ |
| His6-Z12211 | 22 | 5.8 × 10⁵ | 1.4 × 10⁻³ | 2.4 × 10⁻⁹ |
| His6-Z12256 | 23 | 3.5 × 10⁵ | 1.2 × 10⁻³ | 3.4 × 10⁻⁹ |
| His6-Z12264 | 10 | 6.0 × 10⁵ | 5.5 × 10⁻⁴ | 9.3 × 10⁻¹⁰ |
| His6-Z12275 | 24 | 5.2 × 10⁵ | 1.1 × 10⁻³ | 2.0 × 10⁻⁹ |
| His6-Z12283 | 25 | 5.5 × 10⁵ | 1.8 × 10⁻³ | 3.3 × 10⁻⁹ |
| His6-Z12289 | 33 | 6.2 × 10⁵ | 3.3 × 10⁻³ | 5.3 × 10⁻⁹ |
| His6-Z12344 | 26 | 7.1 × 10⁵ | 6.6 × 10⁻⁴ | 9.2 × 10⁻¹⁰ |
| His6-Z12481 | 27 | 5.2 × 10⁵ | 8.9 × 10⁻⁴ | 1.7 × 10⁻⁹ |
| His6-Z12498 | 34 | 6.0 × 10⁵ | 2.3 × 10⁻³ | 3.8 × 10⁻⁹ |
| His6-Z12522 | 35 | 7.1 × 10⁵ | 4.4 × 10⁻³ | 6.2 × 10⁻⁹ |
| His6-Z12634 | 7 | 6.9 × 10⁵ | 4.3 × 10⁻³ | 6.3 × 10⁻⁹ |
| His6-Z15167 | 4 | 1.3 × 10⁶ | 1.4 × 10⁻³ | 1.1 × 10⁻⁹ |

TABLE 12
IC50 values for maturated Z-variants

| | SEQ ID NO | IC50 |
|---|---|---|
| Analyte | of Z variant: | (nM) |
| His6-Z10241 | 11 | 5.3 |
| His6-Z10433 | 28 | 14 |
| His6-Z10462 | 12 | 6.6 |
| His6-Z10508 | 2 | 5.7 |
| His6-Z10532 | 1 | 6.4 |
| His6-Z10534 | 13 | 6.5 |
| His6-Z10566 | 14 | 9.6 |
| His6-Z10675 | 15 | 5.3 |
| His6-Z10681 | 29 | 25 |
| His6-Z10718 | 16 | 28 |
| His6-Z10722 | 30 | 35 |
| His6-Z10859 | 31 | 26 |
| His6-Z10863 | 3 | 8.5 |
| His6-Z12059 | 17 | 3.7 |
| His6-Z12060 | 5 | 7.9 |
| His6-Z12073 | 18 | 4.0 |
| His6-Z12077 | 19 | 5.5 |
| His6-Z12078 | 8 | 4.5 |
| His6-Z12081 | 6 | 8.1 |
| His6-Z12115 | 20 | 3.0 |
| His6-Z12163 | 9 | 7.0 |
| His6-Z12180 | 21 | 4.3 |
| His6-Z12192 | 32 | 28 |
| His6-Z12211 | 22 | 2.9 |
| His6-Z12256 | 23 | 4.4 |
| His6-Z12264 | 10 | 4.4 |
| His6-Z12275 | 24 | 4.8 |
| His6-Z12283 | 25 | 6.9 |
| His6-Z12289 | 33 | 18 |
| His6-Z12344 | 26 | 4.8 |
| His6-Z12481 | 27 | 3.0 |
| His6-Z12498 | 34 | 11 |
| His6-Z12522 | 35 | 10 |
| His6-Z12634 | 7 | 9.8 |
| Z10241-His6 | 11 | 3.3 |

### Example 9

### Production of IL-17 Binding Z-ABD-Z Polypeptides

[0376] IL-17A is a homodimeric cytokine that possesses two receptor binding sites. It was speculated that a polypeptide comprising two moieties of an IL-17A binding Z variant of the present disclosure would block IL-17A more efficiently than a polypeptide comprising one such moiety. This Example describes the general procedure for subcloning and production of polypeptides comprising two Z variants in fusion with the albumin binding domain variant PP013 (SEQ ID NO:1224) in the general format Z-[L1]-ABD-[L2]-Z where [L1] and [L2] are linkers separating the Z and ABD moieties.

### Materials and Methods

[0377] Subcloning of Z-[L1]-ABD-[L2]-Z polypeptides with different [L1] and [L2] linker lengths: The DNA of Z06282 (SEQ ID NO:1206), Z10241 (SEQ ID NO:11) and Z10532 (SEQ ID NO:1) were amplified from the library vector pAY02592 by PCR using Pfu Turbo DNA polymerase (Agilent Technologies, cat. no. 600254) together with suitable primer pairs. The Z-[L1]-ABD-[L2]-Z constructs were generated by ligation of DNA encoding each moiety into the expression vector pET26b(+) (Novagen, Madison, Wis.) in three subsequent cloning steps using T4 DNA ligase (Fermentas, cat. no. EL0011). DNA encoding the three moieties were separated by DNA encoding hybridized linkers with different number of repeats of (GGGGS)ₙ, flanked by restriction enzyme sites. The constructs encoded by the expression vectors were Z#####-[GAP-(G₄S)ₙ-TS]-PP013-[GT-(G₄S)ₙ-PR]-Z#####, where each n individually is 1-4, and as further specified in Table 13.

TABLE 13
Dimeric Z variants fused to ABD via different
[L1] and [L2] lengths

| | SEQ | |
|---|---|---|
| Designation | ID NO | Z-[L1]-ABD-[L2]-Z polypeptide |
| ZAZ3174 | 1233 | Z06282-[GAP-(G₄S)₄-TS]-PP013-[GT-(G₄S)₄- |
| | | PR]-Z06282 |
| ZAZ3175 | 1234 | Z06282-[GAP-(G₄S)₃-TS]-PP013-[GT-(G₄S)₃- |
| | | PR]-Z06282 |
| ZAZ3176 | 1235 | Z06282-[GAP-(G₄S)₂-TS]-PP013-[GT-(G₄S)₂- |
| | | PR]-Z06282 |
| ZAZ3236 | 1240 | Z06282-[GAP-G₄S-TS]-PP013-[GT-G₄S- |
| | | PR]-Z06282 |
| ZAZ3237 | 1241 | Z06282-[GAP-G₄S-TS]-PP013-[GT-(G₄S)₂- |
| | | PR]-Z06282 |
| ZAZ3220 | 1236 | Z10241-[GAP-(G₄S)₄-TS]-PP013-[GT-(G₄S)₄- |
| | | PR]-Z10241 |
| ZAZ3221 | 1237 | Z10532-[GAP-(G₄S)₄-TS]-PP013-[GT-(G₄S)₄- |
| | | PR]-Z10532 |

Restriction sites (I)-(IV) in DNA encoding Z#####-[(I)-(G₄S)n-(II)]-PP013-[(III)-(G₄S)n-(IV)]-Z##### are cleavable with restriction enzymes AscI (I), SpeI (II), KpnI (III) and SacII (IV), respectively

[0378] Subcloning of Z-[L1]-ABD-[L2]-Z polypeptides with a minimal [L1] linker: DNA encoding additional dimeric Z variants comprising Z06282 (SEQ ID NO:1206) but with a minimal linker [L1] were generated using standard molecular biology techniques. The constructs encoded by the expression vectors were Z06282-VDGS-PP013-GT-(G₄S)ₙ-PR-Z06282 and as further specified in Table 14.

[0379] The genes encoding Z12876 (SEQ ID NO:1218), Z14253 (SEQ ID NO:1219), Z14254 (SEQ ID NO:1220) and Z14255 (SEQ ID NO:1221) (corresponding to Z10241 (SEQ ID NO:11), Z10532 (SEQ ID NO:1), Z10508 (SEQ ID NO:2) and Z10863 (SEQ ID NO:3), respectively, but starting with the amino acid residues AE instead of VD) were amplified by PCR using Pfu Turbo DNA polymerase together with suitable primer pairs. The Z-[L1]-ABD-[L2]-Z constructs were generated by ligation of each fragment into the expression vector pET26b(+) in three subsequent cloning steps using T4 DNA ligase. DNA encoding the three moieties were separated by linkers further modified by site-directed mutagenesis using standard molecular biology techniques. The constructs encoded by the expression vectors were Z####-[VDGS]-PP013-[GT-G₄S-PK]-Z#### and Z#####-[ASGS]-PP013-[GT-G₄S]-Z#####, and as further specified in Table 14.

TABLE 14
Dimeric Z variants fused to ABD via a minimal [L1] linker

| | SEQ | | |
|---|---|---|---|
| | ID | | |
| Designation | NO | Z-[L1]-ABD-[L2]-Z polypeptide | Mutations |
| ZAZ3234 | 1238 | Z06282-[VDGS]-PP013- | |
| | | GT-G₄S-PR-Z06282 | |
| ZAZ3235 | 1239 | Z06282-[VDGS]-PP013- | |
| | | GT-(G₄S)₂-PR-Z06282 | |
| ZAZ3269 | 1242 | Z12876-[VDGS]-PP013- | R117K |
| | | [GT-G₄S-PK]-Z12876 | |
| ZAZ3270 | 1243 | Z12876-[ASGS]-PP013- | V59A, D60S, |
| | | [GT-G₄S]-Z12876 | Δ116P, Δ117R |
| ZAZ3363 | 1244 | Z14253-[ASGS]-PP013- | V59A, D60S, |
| | | [GT-G₄S]-Z14253 | Δ116P, Δ117R |
| ZAZ3364 | 1245 | Z14254-[ASGS]-PP013- | V59A, D60S, |
| | | [GT-G₄S]-Z14254 | Δ116P, Δ117R |
| ZAZ3365 | 1246 | Z14255-[ASGS]-PP013- | V59A, D60S, |
| | | [GT-G₄S]-Z14255 | Δ116P, Δ117R |
| ZAZ3422 | 1247 | Z15166-[ASGS]-PP013- | D25A in both |
| | | [GT-G₄S]-Z15166 | Z14253 |
| | | | moieties in |
| | | | ZAZ3363 |

Δdeletion of the indicated amino acid residue

[0380] Cultivation: E. coli BL21(DE3) cells (Novagen) were transformed with plasmids containing the gene fragment of each respective Z-ABD-Z polypeptide and cultivated at 37° C. in 800 or 1000 ml of TSB-YE medium supplemented with 50 μg/ml kanamycin. In order to induce protein expression, IPTG was added to a final concentration of 0.2 mM at OD₆₀₀=2 and the cultivation was incubated at 37° C. for another 5 h. The cells were harvested by centrifugation.

[0381] Purification of IL-17A binding Z-ABD-Z polypeptides: Cell pellets were re-suspended in TST buffer (25 mM Tris-HCl, 1 mM EDTA, 200 mM NaCl, 0.05% Tween 20, pH 8.0) supplemented with Benzonase® (Merck). After cell disruption by sonication and clarification by centrifugation, each supernatant was applied onto a column packed with agarose and immobilized with an anti-ABD ligand (produced in-house). After washing with TST buffer and 5 mM NH₄Ac pH 5.5 buffer, the Z-ABD-Z polypeptides were eluted with 0.1 M HAc. Acetonitrile (ACN) was added to eluted fractions to a final concentration of 10% and the samples were loaded on SOURCE 15RPC columns (GE Healthcare), previously equilibrated with RPC solvent A (0.1% TFA, 10% ACN, 90% water). After column wash with RPC solvent A, bound proteins were eluted with a linear gradient from RPC solvent A to RPC solvent B (0.1% TFA, 80% ACN, 20% water). Fractions containing pure Z-ABD-Z polypeptides were identified by SDS-PAGE analysis and pooled. After the RPC purification, the buffer of the pool was exchanged to PBS (2.68 mM KCl, 137 mM NaCl, 1.47 mM KH₂PO₄, 8.1 mM Na₂HPO₄, pH 7.4) using Sephadex G-25 columns (GE Healthcare). Finally, the Z-ABD-Z variants were purified on EndoTrap® red columns (Hyglos) to ensure low endotoxin content.

[0382] Protein concentrations were determined by measuring the absorbance at 280 nm, using a NanoDrop® ND-1000 spectrophotometer and the extinction coefficient of the respective protein. Purity was analyzed by SDS-PAGE stained with Coomassie Blue, and the identity of each purified Z-ABD-Z variant was confirmed by HPLC-MS analysis.

### Results

[0383] Cultivation and purification: The IL-17A binding Z variants in fusion with ABD were expressed as soluble gene products in E. coli. SDS-PAGE analysis of each final protein preparation showed that these predominantly contained the desired IL-17A binding Z-ABD-Z polypeptide. The correct identity and molecular weight of each Z-ABD-Z polypeptide were confirmed by HPLC-MS analysis.

### Example 10

### Solubility of Z-ABD-Z Polypeptides

[0384] The solubility of three Z-ABD-Z polypeptides in physiological buffer was investigated by consecutive concentrations of the samples using ultrafiltration, followed by concentration measurements by absorbance readings at 280 nm and visual inspection of the samples.

### Materials and Methods

[0385] The Z-ABD-Z polypeptides ZAZ3363 (SEQ ID NO:1244), ZAZ3364 (SEQ ID NO:1245) and ZAZ3422 (SEQ ID NO:1247) were diluted in PBS, pH 7.4, to 2.5 mg/ml. 12 Amicon Ultra centrifugal filter units with a cut-off of 3 kDa (Millipore, cat. no. UFC800324) were prerinsed with PBS by centrifugation at 4000 g for 10 min in a swinging bucket rotor centrifuge. The concentrators were emptied, and 4 ml of each Z-ABD-Z polypeptide were added to a first set of three different centrifugal filter units. Centrifugation was performed at 4000 g, 20° C., for 13-16 min, resulting in approximately 1 ml concentrate. A 20 μl sample was removed from each concentrate (UF sample 1) for further analysis and the rest of the sample volumes were transferred to a second set of three centrifugal filter units. The centrifugation and sample removal were repeated three times with spinning times of 8-10 min, 7 min and 13 min, respectively, (UF samples 2, 3 and 4, respectively). Absorbance readings were performed using a NanoDrop® ND-1000 Spectrophotometer and by diluting UF samples 1-4 in PBS 3, 6, 12 and 24 times, respectively. The concentrations were calculated using the theoretical extinction coefficient 1 Abs280=0.612 mg/ml (the same for all three Z-ABD-Z polypeptides). Absorbance readings of the undiluted filtrates were also performed.

### Results

[0386] Concentrations determined by absorbance readings at 280 nm after each centrifugal step are shown in Table 15. No aggregates were detected by visual inspection of the concentrates. Thus, the solubility of ZAZ3363, ZAZ3364 and ZAZ3422 were determined to be at least 60 mg/ml in PBS, pH 7.4. Absorbance readings of the undiluted filtrates showed concentrations very close to 0 mg/ml.

TABLE 15
Concentration after consecutive concentration of Z-ABD-Z samples

| | | | | | | Total time of |
|---|---|---|---|---|---|---|
| Z-ABD-Z | SEQ | Concentration (mg/ml) | | | | centrifugation |
| polypeptide | ID NO | UF1 | UF2 | UF3 | UF4 | (min) |
| ZAZ3363 | 1244 | 9.6 | 21 | 36 | 64 | 44 |
| ZAZ3364 | 1245 | 8.2 | 21 | 38 | 60 | 43 |
| ZAZ3322 | 1247 | 9.3 | 20 | 35 | 64 | 44 |

### Example 11

### Biacore Binding Cross-Species Analysis

### Materials and Methods

[0387] The interaction of the Z-ABD-Z polypeptides ZAZ3363 (SEQ ID NO:1244), ZAZ3364 (SEQ ID NO:1245) and ZAZ3365 (SEQ ID NO:1246) with hIL-17A and cynomolgus monkey IL-17A (cIL-17A, SEQ ID NO:1229; Evitria, custom order) as well as the interaction of ZAZ3220 (SEQ ID NO:1236) with hIL-17A and rhesus monkey IL-17A (rmIL-17-A, SEQ ID NO:1230; Cusabio, cat. no. CSB-EP011597MOV) were analyzed in a Biacore 2000. HSA was immobilized in the flow cell on the carboxylated dextran layer of a CM5 chip surface. The immobilization was performed using amine coupling chemistry according to the manufacturer's protocol and using HBS-EP as running buffer. The HSA immobilization levels on the surfaces were 953 RU (used for ZAZ3363, ZAZ3364 and ZAZ3365) and 493 RU (used for ZAZ3220), respectively. One flow cell surface on the chip was activated and deactivated for use as blank during analyte injections. In the binding experiments, HBS-EP was used as running buffer and the flow rate was 30 μl/min. ZAZ3363, ZAZ3364 and ZAZ3365 were diluted in HBS-EP running buffer to a final concentration of 200 nM and injected for 5 min, followed by injections of the IL-17A variants. ZAZ3220 was diluted in HBS-EP running buffer to a final concentration of 500 nM and injected for 4 min followed by injections of the IL-17A variants. hIL-17A and cIL-17A were each diluted in HBS-EP running buffer to final concentrations of 2.5, 10 and 40 nM and injected for 5 min over surfaces with ZAZ3363, ZAZ3364 and ZAZ3365 captured on HSA. After 10 min of dissociation, the surface was regenerated with two injections of 10 mM HCl. hIL-17A and rmIL-17A were diluted in HBS-EP running buffer to final concentrations of 0.1, 0.3, 0.9, 2.7, and 8.1 nM and 2.7, 8.1, 24.3, 72 and 216 nM, respectively, and injected for 6 min over surfaces with ZAZ3220 captured on HSA. After 5 min of dissociation, the surface was regenerated with two injections of 10 mM HCl. The results were analyzed using the BiaEvaluation software.

### Results

[0388] Binding of hIL-17A and cIL-17A to ZAZ3363, ZAZ3364 and ZAZ3365, and hIL-17A and rmIL-17A to ZAZ3220 were tested in a Biacore instrument by injecting the Z-ABD-Z polypeptides over a surface containing HSA followed by injections of the IL-17A variants. All tested Z variants showed binding to the tested IL-17A variants, i.e. ZAZ3363, ZAZ3364 and ZAZ3365 showed binding to human and cynomolgus monkey IL-17A (FIG. 6) and ZAZ3220 to human and rhesus monkey IL-17A.

### Example 12

### Biacore Binding Specificity Analysis

[0389] In this Example, the specificities of two Z-ABD-Z polypeptides were tested by analysing their potential interaction with a set of proteins of the IL-17 family, with other interleukins and with other abundant plasma proteins. The same set of analyte proteins were also analyzed for their potential interaction with the ABD variant PEP07843.

### Materials and Methods

[0390] The interaction of ZAZ3363 (SEQ ID NO:1244) or ZAZ3422 (SEQ ID NO:1247) with panels of 24 or 12 different proteins (specified in Table 16), respectively, were analyzed in a Biacore 2000 instrument. HSA and the ABD variant PEP07843 (SEQ ID NO:1225, corresponding to PP013 (SEQ ID NO:1224) with an N-terminal extension of GSS) were immobilized on a CM5 chip surface and a blank surface was prepared as described in Example 11. The ligand immobilization levels on the surfaces were 1315 RU and 99 RU of HSA and PEP07843, respectively, for the chip used in ZAZ3363 runs, and 791 RU and 100 RU of HSA and PEP07843, respectively, for the chip used in ZAZ3422 runs. In the binding experiment, HBS-EP was used as running buffer and the flow rate was 30 μl/min. ZAZ3363 and ZAZ3422 were diluted in HBS-EP or HBS-EP supplemented with 500 mM NaCl to a final concentration of 200 nM and injected for 7 min followed by injections of the analytes. The analytes, i.e. the panels of 24 or 12 different proteins, were each diluted in HBS-EP or HBS-EP supplemented with 500 mM NaCl to final concentrations of from 0.4 to 250 nM and injected for 5 min. After 7 (ZAZ3363) or 10 (ZAZ3422) min of dissociation, the surfaces were regenerated with four (ZAZ3363) or five (ZAZ3422) injections of 10 mM NaOH and two injections of 10 mM HCl. The results were analyzed using the BiaEvaluation software.

TABLE 16
Analyte proteins tested with ZAZ3363 and ZAZ3422

| | | Second injection | | | |
|---|---|---|---|---|---|
| First injection | | | | Analyte | |
| ZAZ3363 | ZAZ3422 | | | conc. | Buffer for |
| (200 nM) | (200 nM) | Analyte protein | Cat. No. | (nM) | sample dilution |
| Yes | Yes | hIL-17A¹ | 200-17 | 2, 10, 50 | HBS-EP and |
| | | | | | HBS-EP + NaCl |
| Yes | Yes | hIL-17A/F² | 5194-IL-025/CF | 50, 250 | HBS-EP + NaCl |
| Yes | Yes | hIL-17B² | 1248-IB-025/CF | 50, 250 | HBS-EP + NaCl |
| Yes | Yes | hIL-17C² | 1234-IL-025/CF | 50, 250 | HBS-EP |
| Yes | Yes | hIL-17D² | 1504-IL-025/CF | 50, 250 | HBS-EP + NaCl |
| Yes | Yes | hIL-17E² | 1258-IL-025/CF | 50, 250 | HBS-EP |
| Yes | Yes | hIL-17F² | 1335-IL/CF | 50, 250 | HBS-EP + NaCl |
| Yes | Yes | hIL-1beta¹ | 200-1B | 50, 250 | HBS-EP |
| Yes | Yes | hIL-6² | 206IL/CF | 50, 250 | HBS-EP |
| Yes | Yes | hIL23² | 1290-IL | 50, 250 | HBS-EP |
| Yes | Yes | hGM-CSF² | 215-GM/CF | 50, 250 | HBS-EP |
| Yes | Yes | IgG | ATC L04AC07 | 50, 250 | HBS-EP |
| | | (RoActemra)³ | | | |
| Yes | No | IgA⁴ | P80-102 | 50, 250 | HBS-EP |
| Yes | No | IL-17RA² | 177-IR | 50, 250 | HBS-EP |
| Yes | No | IL-1R1² | 269-1R/CF | 50, 250 | HBS-EP |
| Yes | No | Alpha-2-HS- | PRO-1644 | 50, 250 | HBS-EP |
| | | glycoprotein | | | |
| | | (AHSG Human | | | |
| | | HEK)⁵ | | | |
| Yes | No | Haptoglobin | PRO-567 | 50, 250 | HBS-EP |
| | | Human (seems | | | |
| | | to be beta | | | |
| | | chain)⁵ | | | |
| Yes | No | Alpha-1- | PRO-529 | 50, 250 | HBS-EP |
| | | antitrypsin | | | |
| | | (SERPINA1 | | | |
| | | Human)⁵ | | | |
| Yes | No | Human a-2 | 10952-H08B | 50, 250 | HBS-EP |
| | | macroglobulin⁶ | | | |
| Yes | No | Human | 10870-H08H | 50, 250 | HBS-EP |
| | | Hemopexin/ | | | |
| | | HPX Protein⁶ | | | |
| Yes | No | AMBP/Alpha 1 | 13141-H08H1 | 50, 250 | HBS-EP |
| | | microglobulin⁶ | | | |
| Yes | No | Beta-2- | 11976-H08H | 50, 250 | HBS-EP |
| | | microglobulin/ | | | |
| | | B2M⁶ | | | |
| Yes | No | Transthyretin/ | 12091-H08H | 50, 250 | HBS-EP |
| | | TTR/ | | | |
| | | Prealbumin/ | | | |
| | | PALB Protein⁶ | | | |
| Yes | No | holo-Transferrin⁷ | T4132 | 50, 250 | HBS-EP |
| Yes | No | IL-17RA² | 177-IR | 50, 250 | HBS-EP |
| Yes | No | IL-1R1² | 269-1R/CF | 50, 250 | HBS-EP |

Suppliers:
¹Peprotech;
²R&D Systems;
³Roche/Apoteket AB;
⁴Bethyl;
⁵ProSpec;
⁶Sino Biological Inc;
⁷Sigma

### Results

[0391] The specificity of ZAZ3363 and ZAZ3422 was tested in a Biacore instrument by investigating their interaction with 24 or 12 analyte proteins, respectively. The Z-ABD-Z polypeptides were injected over surfaces containing HSA followed by injection of the analyte proteins. The only interactions detected for ZAZ3363 and ZAZ3422 were strong binding by hIL-17A and weaker binding by hIL-17A/F, as expected and in line with the results presented in Example 8. The analyte proteins were also assessed for their potential interaction with the ABD variant PEP07843, but no interactions were detected. Thus, the Z-ABD-Z polypeptides appear to be highly specific.

### Example 13

### Kinetic Measurements of Z-ABD-Z, IL-17A and HSA Complexes using KinExA®

[0392] Technical limitations of SPR to accurately determine kinetic parameters for high affinity interactions and the higher complexity of determining the affinity between two dimeric targets by SPR warranted the use of Kinetic Exclusion Assay (KinExA®) technology to further analyze the binding of Z-ABD-Z polypeptides in complex with HSA to IL-17A, as well as the binding of Z-ABD-Z polypeptides alone, or in complex with IL-17A, to HSA. The KinExA® measures the equilibrium binding affinity and kinetics between unmodified molecules in solution phase (Darling and Brault, 2004. Assay and Drug Dev Tech 2(6):647-657)

### Materials and Methods

[0393] The Z-ABD-Z polypeptides ZAZ3220 (SEQ ID NO:1236), ZAZ3363 (SEQ ID NO:1244) and ZAZ3422 (SEQ ID NO:1247), as well as HSA (Novozymes, cat. no. 230-005), human IL-17A (Peprotech, cat. no. 200-17), biotinylated (as described in Example 1) human IL-17A, mouse monoclonal anti-HSA antibody (Abcam, cat. no. 10241) and an in house produced goat polyclonal anti-Z antibody were sent to Sapidyne Instruments Inc (Boise, Id., USA) who performed the KinExA® mesurements and analysis.

[0394] Binding of Z-ABD-Z/HSA to IL-17A: For determination of the affinity, i.e. K_{D}, the respective Z-ABD-Z polypeptide, in complex with HSA, were used as a constant binding partner (CBP) and IL-17A was used as titrant. Data analysis was performed using the KinExA® Pro software and applying a least squares analysis to fit the optimal solutions for the K_{D} and the Active Binding site Concentration (ABC) to a curve representative of a 1:1 reversible bi-molecular interaction.

[0395] For determination of kₐ, the direct binding curve analysis was applied, using the same immobilized IL-17A as the capture reagent for kinetic experiments as for equilibrium experiments. The amount of free Z-ABD-Z/HSA in the sample was measured pre-equilibrium, yielding data points that monitored the decrease in free Z-ABD-Z/HSA as the sample moved toward equilibrium.

[0396] Binding of Z-ABD-Z and Z-ABD-Z/IL-17A to HSA: The Z-ABD-Z polypeptide ZAZ3363 was further analyzed for binding to HSA in the presence or absence of IL-17A. For determination of K_{D}, ZAZ3363, free or in complex with IL-17A, was used as a constant binding partner (CBP) and HSA was used as titrant. Data analysis was performed using the KinExA® Pro software as described above.

[0397] For determination of kₐ, the direct binding curve analysis was applied, using the same immobilized HSA as the capture reagent for kinetic experiments as for equilibrium experiments. The amount of ZAZ3363/IL-17A, in the sample was measured pre-equilibrium, yielding data points that monitored the decrease in free ZAZ3363/IL-17A as the sample moved toward equilibrium.

### Results

[0398] In a first set of KinExA® measurements, the Z-ADB-Z polypeptides ZAZ3220, ZAZ3363 and ZAZ3422, respectively, in complex with HSA were shown to bind IL-17A with an exceptionally high affinity, with K_{D} values in the subpicomolar to femtomolar range. The calculated kinetic parameters when assuming a monovalent binding between these Z-ABD-Z polypeptides and dimeric IL-17A are shown in Table 17.

[0399] In a second set of KinExA® measurements, the interaction between ZAZ3363, free or in complex with IL-17A, and HSA was measured. The calculated kinetic parameters from these analyses are shown in Table 18. The affinity of ZAZ3363 for HSA was not significantly affected by the presence of IL-17A.

[0400] To summarize, measurements using KinExA® technology indicated an exceptionally high affinity of Z-ABD-Z polypeptides for IL-17A. The measured K_{D} of <0.33 pM is superior to the reported affinities for two of the clinically most advanced comparators secukinumab (K_{D}=122 pM; WO2006/013107 and WO2012/125680) and ixekizumab (K_{D}=2 pM; WO2007/070750). In addition, simultaneous binding to both IL-17A and albumin was demonstrated, i.e. both binding functions are intact in the Z-ABD-Z fusion protein.

TABLE 17
Kinetic parameters for Z-ABD-Z polypeptides binding to IL-17A

| | SEQ | ka^{a} [*] | kd | K_{D} [*] |
|---|---|---|---|---|
| CBP | ID NO | (M⁻¹s⁻¹) | (s⁻¹) | (M) |
| ZAZ3220/HSA | 1236 | 1.35 × 10⁷ | 1.51 × 10⁻⁷ | <6.5 × 10⁻¹⁴ |
| | | [1.25 × 10⁷- | | [**] |
| | | 1.46 × 10⁷] | | |
| ZAZ3363/HSA | 1244 | 4.78 × 10⁶ | 1.55 × 10⁻⁶ | 3.23 × 10⁻¹³ |
| | | [5.64 × 10⁶- | | [1.54 × 10⁻¹³- |
| | | 4.04 × 10⁶] | | 5.54 × 10⁻¹³] |
| ZAZ3422/HSA | 1247 | 7.80 × 10⁶ | 6.08 × 10⁻⁷ | 7.85 × 10⁻¹⁴ |
| | | [6.37 × 10⁶- | | [1.63 × 10⁻¹⁴- |
| | | 9.56 × 10⁶] | | 1.73 × 10⁻¹³] |

[*] 95% confidence interval
[**] 95% confidence interval for K_{D} was not resolved

TABLE 18
Kinetic parameters for a Z-ABD-Z polypeptide binding to HSA

| | SEQ | ka [*] | kd | K_{D} [*] |
|---|---|---|---|---|
| CBP | ID NO | (M⁻¹s⁻¹) | (s⁻¹) | (M) |
| ZAZ3363 | 1244 | n.d. | n.d. | 4.85 × 10⁻¹¹ |
| | | | | [3.23 × 10⁻¹¹- |
| | | | | 6.87 × 10⁻¹¹] |
| ZAZ3363/IL-17A | 1244 | 1.21 × 10⁶ | 3.56 × 10⁻⁵ | 2.94 × 10⁻¹¹ |
| | | [9.35 × 10⁵- | | [1.72 × 10⁻¹¹- |
| | | 1.50 × 10⁶] | | 4.64 × 10⁻¹¹] |

[*] 95% confidence interval

### Example 14

### Characterization of Z-ABD-Z Polypeptides in the NHDF Assay

### Materials and Methods

[0401] Blocking of IL-17A induced IL-6 production in NHDF assay: NHDF cells (Lonza, cat. no. CC-2511) were cultured in fibroblast basal medium (Lonza, cat. no CC-3132) supplied with growth promoting factors (Lonza, cat. no. CC-5034). On the day before the experiment, 5000 cells per well were seeded into half area 96 well culture plates (Greiner, cat. no. 675180) in 100 μl. On the day of the experiment, dilutions of IL-17A specific Z-ABD-Z polypeptides with different linker lengths between the Z and ABD moieties (ZAZ3174 (SEQ ID NO:1233), ZAZ3175 (SEQ ID NO:1234), ZAZ3176 (SEQ ID NO:1235), ZAZ3220 (SEQ ID NO:1236), ZAZ3221 (SEQ ID NO:1237), ZAZ3234 (SEQ ID NO:1238), ZAZ3235 (SEQ ID NO:1239), ZAZ3236 (SEQ ID NO:1240), ZAZ3237 (SEQ ID NO:1241), ZAZ3269 (SEQ ID NO:1242) and ZAZ3270 (SEQ ID NO:1243)) were prepared in a separate 96-well plate. The Z-ABD-Z polypeptides were titrated in three-fold steps from 190 nM to 0.003 nM in medium containing 0.9 nM hIL-17A and 8 μM HSA. A standard IL-17A curve was also prepared (6.2-0.0001 nM), as well as controls containing medium with 0.9 nM IL-17A or medium alone. The medium in the plate with NHDF cells cultured overnight was discarded and 100 μl/well of the sample was transferred to the cell plate, which was placed in an incubator at 37° C. for 18-24 h. The next day, the IL-6 content in supernatants was quantified using IL-6 specific ELISA as described in Example 3. Additional Z-ABD-Z polypeptides (ZAZ3363 (SEQ ID NO:1244), ZAZ3364 (SEQ ID NO:1245), ZAZ3365 (SEQ ID NO:1246) and ZAZ3422 (SEQ ID NO:1247)) were analyzed in subsequent NHDF assays essentially as described above, but using an NHDF cell line from ATCC (cat. no. PSC-201-012). The blocking capacities of these Z-ABD-Z polypeptides were also analyzed after incubation of the polypeptides at 40° C. for 2 and 4 weeks.

### Results

[0402] Z-ABD-Z polypeptides were investigated for their capacity to block IL-17A induced IL-6 production in the NHDF assay. First, it was seen that the Z-ABD-Z format increased the blocking capacity significantly compared to the monomeric His₆-Z format, as shown in FIG. 7A where inhibitory curves for His₆-Z10241 and ZAZ3220 (comprising Z10241) are displayed. The shape of the curve for ZAZ3220 suggests that the limit of detection for this cell assay is reached, with a one-to-one inhibition effect of the ZAZ3220, and it is likely that the Z-ABD-Z polypeptide has an even better inhibitory effect than can be appreciated from this experiment. It is contemplated that the potency of ZAZ3220 is increased to the assay limit due to the strong avidity effect obtained by binding the homodimeric IL-17A. Second, a comparison of Z-ABD-Z polypeptides with different linker lengths and comprising the Z variants Z06282 (SEQ ID NO:1206) and Z12876 (SEQ ID NO:1218) revealed that the length of the linker had a minor effect on the blocking capacity. A set of Z-ABD-Z polypeptides comprising Z06282 with different linker lengths is displayed in FIG. 7B. Additional Z-ABD-Z polypeptides, ZAZ3363, ZAZ3364, ZAZ3365 and ZAZ3422, were analyzed in subsequent NHDF assays, also after incubation of the Z-ABD-Z polypeptides at 40° C. for two and four weeks. The IL-17A inhibitory capacity was retained even after four weeks' incubation at 40° C. Calculated IC50 values, reflecting the capacity of different Z-ABD-Z polypeptides to inhibit IL-17A, are summarized in Table 19. These IC50 values are more than three-fold lower than the reported hIL-6 production neutralizing activity (IC50=2.1±0.1 nM) of the IL-17A inhibiting monoclonal antibody secukinumab, AIN457, (WO2006/013107 and WO2012/125680) currently in clinical development.

TABLE 19
Calculated IC50 values from NHDF assays

| | | Incubation | |
|---|---|---|---|
| Z-ABD-Z | SEQ | at 40° C. | IC50 |
| polypeptide | ID NO | (weeks) | (nM) |
| ZAZ3174 | 1233 | n.a. | 0.63 |
| ZAZ3175 | 1234 | n.a. | 0.56 |
| ZAZ3176 | 1235 | n.a. | 0.50 |
| ZAZ3220 | 1236 | n.a. | 0.27 |
| ZAZ3221 | 1237 | n.a. | 0.39 |
| ZAZ3234 | 1238 | n.a. | 0.66 |
| ZAZ3235 | 1239 | n.a. | 0.60 |
| ZAZ3236 | 1240 | n.a. | 0.54 |
| ZAZ3237 | 1241 | n.a. | 0.49 |
| ZAZ3269 | 1242 | n.a. | 0.42 |
| ZAZ3270 | 1243 | n.a. | 0.41 |
| ZAZ3363 | 1244 | 0 | 0.38 |
| ZAZ3363 | 1244 | 2 | 0.25 |
| ZAZ3363 | 1244 | 4 | 0.49 |
| ZAZ3364 | 1245 | 0 | 0.20 |
| ZAZ3364 | 1245 | 2 | 0.40 |
| ZAZ3364 | 1245 | 4 | 0.47 |
| ZAZ3365 | 1246 | 0 | 0.45 |
| ZAZ3365 | 1246 | 2 | 0.34 |
| ZAZ3365 | 1246 | 4 | 0.55 |
| ZAZ3422 | 1247 | 0 | 0.38 |
| ZAZ3422 | 1247 | 2 | 0.45 |
| ZAZ3422 | 1247 | 4 | 0.42 |

### Example 15

### In Vivo Neutralization of hIL-17A

[0403] Human IL-17A is able to bind to and stimulate the mouse IL-17 receptor, leading to elevation and subsequent secretion of mouse KC (CXCL1) chemokine.

### Materials and Methods

[0404] In vivo neutralization of hIL-17A in the KC mouse model: Dose ranging experiments were performed to identify the optimal dose of human IL-17A for induction of mouse KC. These experiments revealed that a 150 μg/kg dose of human IL-17A induced a suitable level of KC in mouse serum collected 2 h after IL-17A administration. ZAZ3174 (SEQ ID NO:1233) and ZAZ3220 (SEQ ID NO:1236) were analyzed in this model at two different occasions. In the first experiment, ZAZ3174 was administered s.c. to mice at three different doses; 0.25, 2.5 and 25 mg/kg, 9 h prior to a subcutaneous injection of human IL-17A. The mice were sacrificed 2 h post administration of human IL-17A, and KC levels were determined by ELISA using a commercially available kit according to the manufacturer's instruction (KC Quantikine; R&D Systems, cat no. D1700). In the second experiment, ZAZ3220 was administered s.c. to mice at three different doses, 0.05, 0.1, 0.4 mg/kg, 9 h prior to a subcutaneous injection of human IL-17A. The mice were sacrificed 2 h post administration of human IL-17A, and KC levels were determined by ELISA as above.

### Results

[0405] In vivo neutralization of hIL-17A in the KC mouse model: The assayed Z-ABD-Z polypeptides block the ability of human IL-17A to stimulate the mouse IL-17 receptor, leading to inhibition of an elevation of mouse KC, in a dose dependent manner. ZAZ3174 at a dose of 2.5 mg/kg under the conditions described, blocked the induction of KC completely, as shown in FIG. 8A. The second experiment revealed that the Z-ABD-Z polypeptide ZAZ3220, comprising an affinity matured Z variant, blocked the IL-17A induced KC-response completely at a dose of 0.4 mg/kg (FIG. 8B). This corresponds to a 6-fold enhanced in vivo blocking effect compared to ZAZ3174. 72% inhibition was obtained with 0.1 mg/kg ZAZ3220.

### Example 16

### In Vivo Pharmacokinetics of Z-ABD-Z Polypeptides in Rats

[0406] This Example describes two separate experiments in which the pharmacokinetic parameters in rat were determined for two different Z-ABD-Z polypeptides following subcutaneous (s.c.) and/or intravenous (i.v.) injections.

### Materials and Methods

[0407] In a first experiment, ZAZ3220 (SEQ ID NO:1236) formulated in PBS was administered i.v. (n=3) to Sprague Dawley (SD) male rats (Charles River, Germany) at a dose of 1.2 mg/kg corresponding to 57 nmol/kg. Blood samples were collected from the tail vein of each rat at time points 0.08, 8, 24, 48, 72, 120, 168, 240, 336, 408 and 504 h after administration.

[0408] In a second experiment, ZAZ3363 (SEQ ID NO:1244) formulated in PBS was administered i.v. (n=5) or s.c. (n=6) to SD male rats at a dose of 1.2 mg/kg corresponding to 64 nmol/kg. Blood samples were collected from the tail vein of each rat at time points 0, 0.08, 0.5, 1, 3, 8, 24, 72, 120, 168, 216, 264, 336, 408, 456 and 504 h post i.v. administration or at time points 0, 0.08, 0.5, 1, 3, 8, 24, 72, 120 and 168 h post s.c. administration.

[0409] Serum was prepared from the blood samples and stored at −20° C. until analysis. Quantification of ZAZ3220 and ZAZ3363 in serum from rats was performed using a PK-ELISA.

[0410] PK-ELISA: 96-well, half-area plates (50 μl/well) were coated with 4 μg/well of goat anti-Z Ig (produced in-house) in coating buffer (Sigma, cat. no. C3041) overnight at 4° C. The next day, the plates were blocked with PBS+0.5% casein for 1.5 h. Individual rat serum, minimally diluted 10× in PBS-casein+10% rat serum pool (assay matrix) was added to the plates and titrated in 2-fold dilution series. Included on one plate was standard of each Z-ABD-Z polypeptide (titrated between 300 ng/ml and 3 pg/ml) and on each plate four controls of each Z-ABD-Z polypeptide diluted to concentration within the linear range of the assay. Standard and controls were diluted in assay matrix. The diluted standard, controls and samples were prepared in separate plates and transferred to the coated ELISA plates. The plates were incubated for 1.5 h at RT followed by 1.5 h incubation with a custom made detection rabbit anti-ABD Ig (4 μg/ml, CUV002) and 1 h incubation with donkey anti-rabbit IgG-HRP (Jackson Immunoresearch, cat. no. 711-035-152). The reaction was developed with TMB (Thermo Fisher) and the development reaction was stopped after 15 min with 2 M H₂SO₄. The absorbance was read at 450 nm in an ELISA reader (Victor³, Perkin Elmer). The concentrations of the respective Z-ABD-Z variant in samples were calculated from the standard curve using GraphPad Prism5 and a four parameter logistic (4-PL) curve-fit.

[0411] Pharmacokinetic analysis: The pharmacokinetic analysis was based on individual rat serum concentration versus time. Terminal half-life (T½) and bioavailability was estimated using Microsoft Excel and GraphPad Prism and applying a two compartment model.

### Results

[0412] Mean serum concentration-time profiles of the Z-ABD-Z polypeptides ZAZ3220 and ZAZ3363 following single administrations of 1.2 mg/kg to SD rats are shown in FIG. 9A and FIG. 9B, respectively, and the calculated pharmacokinetic parameters using a two-compartment analysis are summarized in Table 20. The estimated half-life (t½) was approximately 49 h for both ZAZ3220 and ZAZ3363 following i.v. administration. The t½ for ZAZ3363 administrated s.c. was 45 h and the bioavailability was calculated to 45%.

TABLE 20
Mean pharmacokinetic parameters of Z-ABD-Z polypeptides
following a single i.v. or s.c. administration to SD rats

| Pharmakokinetic | ZAZ3220 | ZAZ3363 | ZAZ3363 |
|---|---|---|---|
| parameter | i.v. | i.v. | s.c. |
| Cmax (nmol/L) | 1905 | 1870 | 330 |
| Tmax (h) | 0.08 | 0.08 | 24 |
| AUC₀₋ₜ (h*nmol/L) | 46369 | 42757 | 19351 |
| t_{1/2} elimination (h) | 49 | 49 | 45 |
| MRT (h) | 35 | 33 | 47 |
| CL (L/h/kg) | 0.003 | 0.003 | 0.003 |
| F (%) | n.a. | n.a. | 45 |

Cmax: Peak serum concentration;
Tmax: Time to reach the peak serum concentration;
AUC₀₋ₜ: Area under the concentration-time curve from time zero to last quantifiable concentration;
T_{1/2}: Half-life;
MRT: Mean residence time;
CL: Clearance;
F: Percentage absolute bioavailability, calculated as F = [(Mean AUC_{s.c.} × Dose_{i.v.})/(Mean AUC_{i.v.} × Dose_{s.c.})] × 100

### Example 17

### Topical Administration of Z Variant to Eyes of Rabbits

[0413] Local administration to the eye is beneficial in ophthalmologic disorders, e.g. uveitis or dry eye diseases. Topical administration enables extremely high local drug concentrations with a minimal risk of systemic side effects. In this Example, the possibility to topically administer Z variant molecules to eyes was investigated in rabbits. The concentration of a Z variant molecule and a control IgG was measured in the anterior chamber (aqueous humor), in the vitreous humor and in serum after four repeated topical dosings.

### Materials and Methods

[0414] Production of Z variant: The Z variant Z10199 (SEQ ID NO:1217) derived from Z06282 (SEQ ID NO:1206) but starting AE was subcloned without any tag but with the C-terminal addition of amino acid residues VD. Expression was performed essentially as described in Example 2, and purification was carried out by anion exchange and reverse phase chromatography. The sample was buffer exchanged to PBS pH 7.2 and endotoxins were removed using an EndoTrap® red 10 column (Hyglos).

[0415] Animal study: 48 nmol (1 drop, 50 μl) of Z10199 and ZAZ3174 (SEQ ID NO:1233), respectively, was administered topically to each eye of rabbits (n=2 per molecule) at time points 0, 1, 2 and 3 hours. A control human IgG antibody (Xolair; Novartis) was administered in the same way to two different rabbits. As a negative control, one rabbit was administered PBS only. After each administration, the eyelids were held closed during approximately 30 s to keep the sample on the cornea. After 4 h, vitreous humor, aqueous humor and serum were collected. The samples were centrifuged to remove tissue debris and aggregates and the levels of Z10199, ZAZ3174 and antibody, respectively, were quantified by ELISA.

[0416] Quantification by ELISA: The concentration of Z10199 and ZAZ3174, respectively, in the collected samples was analyzed by a sandwich ELISA using an in-house produced polyclonal goat anti-protein Z immunoglobulin for capture, an in-house produced polyclonal rabbit anti-protein Z immunoglobulin as primary antibody and goat anti-rabbit IgG-HRP (Dako cat. no. P0448) as secondary antibody. Detection was performed by incubation with ImmunoPure TMB for 15 min at RT and the reaction was stopped by addition of 2 M H₂SO₄. Absorption at 450 nm was measured with the microplate reader Victor³. The concentration of Z10199 was calculated from a standard curve prepared with the same molecule and using GraphPad prism5 and a non-linear regression formula.

[0417] The concentration of IgG in the collected samples was analyzed by an IgG ELISA kit (Abcam 100547) and performed as described by the manufacturer, using a standard curve provided and analysis by non-linear regression as above.

### Results

[0418] FIG. 10 shows that both Z10199 and ZAZ3174 penetrated the eye after topical administration and was present in aqueous and vitreous humor at low nM concentrations. In contrast, the control IgG antibody was not detected in either aqueous or vitreous humor. The serum samples could be regarded as negative for both the Z variant and IgG. Thus, the Z variant molecules of the present disclosure may be delivered by this alternative route of administration, which is not available to antibodies, and a local effect that avoids systemic exposure may be achieved.

### Example 18

### Pharmacokinetic Analysis of Duodenal Administration of ZAZ3363 Formulations in Rat

### Materials and Methods

[0419] Test item: ZAZ3363 (SEQ ID NO:1244) was formulated in 1) OAF1: 0.12 M sodium chenodeoxycholate (Sigma, cat. no. C8261) and 0.12 M propyl gallate (Sigma, cat. no. P3130), pH 7.4; 2) OAF2: 50 mg/ml sodium caprate (Sigma, cat. no. C4151); or 3) 50 mM sodium phosphate (PBS), pH 7.0, at a concentration of 50 mg/ml (OAF1 and OAF2) or 100 mg/ml (PBS).

[0420] NHDF cell assay: The activity of ZAZ3363 (SEQ ID NO:1244) formulated in OAF1, OAF2 or PBS was verified in the IL-17 dependent NHDF cell assay described in Example 14.

[0421] Duodenal administration: Male Sprague Dawley rats (Charles River) were anesthetized with isofluorane, and a small incision was made to localise the duodenum. An indwelling catheter (R-DUOD, AgnTho's, Sweden) was inserted surgically into the duodenum 20 mm from its origin in an area of minimal vasculature. The catheter was tunnelled subcutaneously to the back of the animals. Abdominal musculature was closed with sutures, while the abdominal skin incision and sub scapular exteriorization site was closed with stainless steel wound clips. The animals were left to recover for 5-6 days before being taken to the study. Post-operative analgesia was administered s.c. prior to surgery (carprofen 5 mg/kg and buprenorphine 0.05 mg/kg). Carprofen was administered once daily also on the two days following surgery. Additional doses of buprenorphine were administered when necessary. Antibiotics (enrofloxacin 0.3 mg/ml) was administered in the drinking water during the recovery period (3-5 days), as well as during the experiment. To mask the bitter taste of enrofloxacin, one piece of sugar was added to 500 ml of drinking water. To ensure a maintained patency, the duodenal catheter was flushed daily with sterile water (0.2-0.5 ml).

[0422] ZAZ3363 was administered directly into duodenum at a dose of 5.4 μmol/kg body weight formulated in OAF1 or OAF2 (n=2) or at 10.8 μmol/kg formulated in PBS (n=2) in a volume of 0.5 ml at time-point zero. Blood samples were taken under isoflurane anesthesia at 1, 3, 8, 24, 72, 120 and 168 h after administration and serum was prepared by standard procedures. The concentration of ZAZ3363 in serum was measured by the quantitative PK-ELISA described in Example 16, but titrating the standard of ZAZ3363 between 70 and 1 ng/ml.

[0423] Pharmacokinetic analysis: The pharmacokinetic analysis was based on individual rat serum concentration versus time. Terminal half-life (T½) and bioavailability was estimated using Microsoft Excel and GraphPad Prism.

### Results

[0424] Activity of formulated ZAZ3363: The activity of ZAZ3363 formulated in OAF1 and OAF2, respectively, was compared to formulation in PBS in the NHDF cell assay. FIG. 11 shows the titration curves of OAF1 compared to PBS formulated ZAZ3363 (FIG. 11A) and OAF2 compared to PBS formulated ZAZ3363 (FIG. 11B). The experiment showed that the activity of ZAZ3363 in the two formulations was identical to PBS, i.e. the biological activity of ZAZ3363 was not affected by the different excipients.

[0425] Intraduodenal uptake of ZAZ3363: Intestinal uptake of OAF1, OAF2 and PBS formulated ZAZ3363 was examined in a rat model of intraduodenal administration (i.d.). The experiment showed an increased uptake with OAF1 and OAF2 formulations compared to PBS (FIG. 12). The bioavailabilities were 0.2, 0.8 and 0.0007 for OAF1, OAF2 and PBS, respectively, as shown in Table 21. OAF2 formulated ZAZ3363 showed the best uptake, on average 1160 times better compared to formulation in PBS although great individual variation was seen. Formulation of ZAZ3363 in OAF1 was on average 260 times better than formulation in PBS.

TABLE 21
Bioavailability and T½ after intraduodenal
administration of ZAZ3363 in three different formulations

| Formulation | T½ (h) | Bioavailability (%) |
|---|---|---|
| PBS | 43 | 0.0007 +/− 0.0002 |
| OAF1 | 43 | 0.2 +/− 0.02 |
| OAF2 | 50 | 0.8 +/− 1.2 |

### Example 19

### Characterization of Anti-IL-17A/Anti-TNF Complexes in the NHDF Assay

### Materials and Methods

[0426] Production of complexes and control antibody: Two different complexes targeting IL-17A and TNF were constructed, as well as an antibody with affinity for TNF. The antibody denoted “Ada”, having the same CDR sequences and specificity as the commercially available monoclonal antibody adalimumab, was constructed using the heavy chain (HC) and light chain (LC) sequences HC_{Ada} (SEQ ID NO:1231) and LC_{Ada} (SEQ ID NO:1232). The IL-17A targeting Z variant Z14253 (SEQ ID NO:1219) moiety was genetically fused, via a flexible 15 residue (GGGGS)₃ linker, to the C-termini of HC_{Ada} or LC_{Ada}, resulting in the complexes HC_{Ada}-Z14253 and LC_{Ada}-Z14253, respectively. A schematic of the constructed complexes is shown in FIG. 13A. Gene synthesis, cloning, production by transient gene expression in CHO cells and purification using Protein A affinity chromatography was performed by Evitria AG (Switzerland).

[0427] Blocking of IL-17A induced IL-6 production in NHDF assay: The NHDF assay was performed essentially as described in Example 14, titrating the study samples HC_{Ada}-Z14253 and LC_{Ada}-Z14253 and their comparators in three-fold steps from 63 nM to 0.003 nM in a medium containing 0.9 nM rhIL-17A. The comparators were ZAZ3363 (SEQ ID NO:1244), the anti-TNF antibody Ada, as well as a negative control Z variant Z04726 (SEQ ID NO:1223; targeting taq polymerase) recombinantly fused to the ABD variant PP013 (SEQ ID NO:1224) via a VDSS linker (denoted Z04726-PP013), as described in Example 2. A standard IL-17A curve was also prepared (6.2-0.0001 nM) as well as controls containing medium with 0.9 nM IL-17A or medium alone. The IL-6 content in supernatants was quantified using the IL-6 specific ELISA described in Example 3.

[0428] Blocking of TNF or TNF/IL-17A induced IL-8 production in NHDF assay: NHDF (Lonza, cat. no. CC-2511) cells were cultured in fibroblast basal medium (Lonza, cat. no. CC-3132) supplied with growth promoting factors (Lonza, cat. no CC-5034). On the day before the experiment, 5000 cells per well were seeded into a half area 96 well culture plates (Greiner, cat. no 675180) in 100 μl. On the day of the experiment, dilutions of HC_{Ada}-Z14253 and LC_{Ada}-Z14253 and the comparators described above were prepared in a separate 96-well plate. The complexes and comparators were titrated in three-fold steps from 5 nM to 0.0007 nM in medium containing 0.1 nM human TNF (R&D Systems, cat. no. 2210-TA/CF) or a mixture of 0.05 nM and 0.1 nM rhIL-17A. Controls containing medium with 0.1 nM TNF or a mixture of 0.05 nM and 0.1 nM rhIL-17A or medium alone were also prepared. The medium in the plate with the overnight cultured NHDF cells was discarded and 100 μl/well of the sample was transferred to the cell plate. The plate was placed in an incubator at 37° C. for 18-24 h. The next day, the IL-8 content in supernatants was quantified using an IL-8 specific ELISA.

[0429] IL-8 ELISA: IL-8 was quantified by a DuoSet ELISA kit (R&D systems, cat. no. DY208). Half area plates (Costar, cat. no. 3690) were coated with the anti-IL-8 capture antibody, 4 μg/ml in PBS, 50 μl/well, overnight at 4° C. On the day of the analysis, the plate was rinsed twice in tap water and then blocked with PBS+1% BSA for 2 h. IL-8 standard (R&D Systems, cat. no. 890806), titrated in a 2-fold dilution series (20-0.01 ng/ml) and supernatants from the cell assay plate were added to the coated ELISA plate (50 μl/well) and incubated for 1.5 h at RT. The plate was washed 4 times in an automated ELISA washer and 20 ng/ml (50 μl/well) of biotinylated anti-IL-8 detection antibody was added. After another 1 h incubation, the plate was washed and 50 μl of streptavidin-HRP (Thermo Fisher, cat. no. N100) diluted 8000× was added per well. The plate was developed after one additional hour's incubation and washing, with 50 μl TMB (Thermo Fisher, cat. no 34021) per well, and the reaction was stopped with 50 μl 2 M H₂SO₄. The absorbances were read in a multi label reader (Victor³, Perkin Elmer).

### Results

[0430] Blocking of IL-17A induced IL-6 production in NHDF assay: The two complexes HC_{Ada}-Z14253 and LC_{Ada}-Z14253 were studied with regard to their capacity to block IL-17A induced IL-6 production in the NHDF assay. Results from the NHDF assay are presented in FIG. 13B. Both HC_{Ada}-Z14253 and LC_{Ada}-Z14253 has a similar capacity to block IL-17A as ZAZ3363. As expected, no inhibition was seen for Ada or the negative control Z04726-PP013.

[0431] Blocking of TNF or TNF/IL-17A induced IL-8 production in NHDF assay: The two complexes HC_{Ada}-Z14253 and LC_{Ada}-Z14253 were studied with regard to their capacity to block TNF or a mixture of TNF/IL-17A induced IL-8 production in the NHDF assay. Results from the NHDF assay showed that HC_{Ada}-Z14253 and LC_{Ada}-Z14253 have similar inhibitory profiles as the anti-TNF antibody Ada with regard to specific TNF blocking capacity (FIG. 13C). However, HC_{Ada}-Z14253 and LC_{Ada}-Z14253 had superior inhibitory profiles compared to Ada and ZAZ3363 in the combination assay, where the blocking effect to both TNF and IL-17 was investigated (FIG. 13D).

### Example 20

### In Vivo Pharmacokinetics of Z-ABD-Z Polypeptide in Monkeys

[0432] This Example describes a repeated dose study conducted over 10 days in cynomolgus monkeys administered with the Z-ABD-Z polypeptide ZAZ3363. The results were used for estimation of the half-life of ZAZ3363 in cynomolgus.

### Materials and Methods

[0433] ZAZ3363 (SEQ ID NO:1244) was administered at 20 mg/kg (n=2; 1 male and 1 female) and 40 mg/kg (n=4; 2 male and 2 female) as a short i.v. infusion on days 1, 4, 7 and 10. Plasma samples for determination of ZAZ3363 concentration were collected in connection with the first dose on day 1 (at time points 0 (pre-dose), 5 min, 0.5, 1, 2, 6, 24 and 48 h after administration) and last dose on day 10 (at time points 0 (pre-dose), 5 min, 0.5, 1, 2, 6, 24, 48 h, 5, 7, 10, 12, 14 and 21 days after administration). Quantification of ZAZ3363 in plasma samples was carried out by LC-MS/MS based on peptides obtained after tryptic digestion of ZAZ3363. Concentration-time profiles were evaluated using both non-compartmental methods with separate analyses for day 1 and day 10 and compartmental methods evaluating the data for day 1 and day 10 combined for each animal.

### Results

[0434] Mean plasma concentration-time profiles of ZAZ3363 following administration on day 1 and day 10 are shown in FIG. 14A and FIG. 14B, respectively. Despite the fact that ZAZ3363 was not administered as a single dose with full PK evaluation, the available results after multiple dosing allows for a prediction of the concentration-time profile after single doses. The plasma concentrations decreased in two phases according to a two-compartment behavior. The t½ of the second phase estimated from this and a second repeated dose study (data not shown) was approximately 4-7.5 days, which is in agreement with the reported t½ for monkey albumin (Deo et al., 1974, J Nutr 104:858-64). No significant gender differences were observed.

### Example 21

### Oral Administration of Z-ABD-Z Polypeptide in Dogs

### Materials and Methods

[0435] Preparation of capsules: ZAZ3363 (SEQ ID NO:1244) was formulated in OAF1 (see Example 18) at a concentration of 100 mg/ml. The formulation was lyophilized and filled in hard shell capsules subsequently enteric coated (performed by Catalent Pharma Solutions, Beinheim, France). Each capsule contained approximately 25 mg ZAZ3363.

[0436] Animal study: The animal study was performed at Huntingdon Life Science (Cambridgeshire, UK). Fasted beagle dogs (n=3; female individuals) each received six capsules containing ZAZ3363 (approximately 150 mg). Serum samples were taken at 0.5, 1, 2, 4, 6, 8, 12, 24 and 96 h after administration.

[0437] Quantification: The concentration of ZAZ3363 in serum samples was quantified using a PK sandwich ELISA essentially as described in Example 16, but using an in-house produced monoclonal anti-Z IgG in the first coating step.

### Results

[0438] The individual dog serum concentrations versus time profiles of ZAZ3363 are shown in FIG. 15. The results showed intestinal uptake of ZAZ3363 in all three animals, but with some variation between individuals. The ZAZ3363 serum concentration reached a maximum of 2-30 nM. Once in the circulation, the serum levels of ZAZ3363 remains stable at least up to 96 h, which is ascribed the interaction with dog albumin of the ABD moiety PP013 (SEQ ID NO:1223) within ZAZ3363. The ability of PP013 to bind dog albumin has been demonstrated previously (WO2012/004384).

### Itemized Listing of Embodiments

[0439] 1. IL-17A binding polypeptide, comprising an IL-17A binding motif BM, which motif consists of an amino acid sequence selected from:
[0440] i) EX₂DX₄AX₆X₇EIX₁₀X₁₁LPNL X₁₆X₁₇X₁₈QX₂₀X₂₁AFIX₂₅ X₂₆LX₂₈X₂₉
[0441] wherein, independently from each other,

[0442] X₂ is selected from A, H, M and Y;

[0443] X₄ is selected from A, D, E, F, K, L, M, N, Q, R, S and Y;

[0444] X₆ is selected from A, Q and W;

[0445] X₇ is selected from F, I, L, M, V, W and Y;

[0446] X₁₀ is selected from A and W;

[0447] X₁₁ is selected from A, D, E, F, G, L, M, N, Q, S, T and Y;

[0448] X₁₆ is selected from N and T;

[0449] X₁₇ is selected from H, W and Y;

[0450] X₁₈ is selected from A, D, E, H and V;

[0451] X₂₀ is selected from A, G, Q, S and W;

[0452] X₂₁ is selected from A, D, E, F, H, K, N, R, T, V, W and Y;

[0453] X₂₅ is selected from A, D, E, G, H, I, L, M, N, Q, R, S, T and V;

[0454] X₂₆ is selected from K and S;

[0455] X₂₈ is selected from I, L, N and R; and

[0456] X₂₉ is selected from D and R;
[0457] and
[0458] ii) an amino acid sequence which has at least 89% identity to the sequence defined in i).

[0459] 2. IL-17A binding polypeptide according to item 1, wherein, in sequence i),

[0460] X₂ is selected from A, H and M;

[0461] X₄ is selected from A, D, E, F, L, M, N, Q, R and Y;

[0462] X₁₁ is selected from A, D, E, F, G, L, M, N, S, T and Y;

[0463] X₁₈ is selected from A, D, E and V;

[0464] X₂₀ is selected from A, G, Q and W;

[0465] X₂₁ is selected from E, F, H, N, R, T, V, W and Y;

[0466] X₂₅ is selected from A, D, E, G, H, I, L, N, Q, R, S, T and V; and

[0467] X₂₈ is selected from I, N and R.

[0468] 3. IL-17A binding polypeptide according to item 2, wherein, in sequence i),

[0469] X₁₆ is T;

[0470] X₁₇ is W;

[0471] X₂₁ is selected from E, F, H, W, T and Y;

[0472] X₂₅ is selected from A, D, E, G, H, I, L, N, Q, R, S and T;

[0473] X₂₆ is K; and

[0474] X₂₉ is D.

[0475] 4. IL-17A binding polypeptide according to any preceding item, wherein sequence i) fulfills at least six of the eleven conditions I-XI:
[0476] I. X₂ is A;
[0477] II. X₄ is selected from D, E and Q;
[0478] III. X₆ is A;
[0479] IV. X₇ is selected from F and V;
[0480] V. X₁₆ is T;
[0481] VI. X₁₇ is W;
[0482] VII. X₁₈ is selected from A and D;
[0483] VIII. X₂₀ is W;
[0484] IX. X₂₆ is K;
[0485] X. X₂₈ is R; and
[0486] XI. X₂₉ is D.

[0487] 5. IL-17A binding polypeptide according to item 4, wherein sequence i) fulfills at least seven of the eleven conditions I-XI.

[0488] 6. IL-17A binding polypeptide according to item 5, wherein sequence i) fulfills at least eight of the eleven conditions I-XI.

[0489] 7. IL-17A binding polypeptide according to item 6, wherein sequence i) fulfills at least nine of the eleven conditions I-XI.

[0490] 8. IL-17A binding polypeptide according to item 7, wherein sequence i) fulfills at least ten of the eleven conditions I-XI.

[0491] 9. IL-17A binding polypeptide according to item 8, wherein sequence i) fulfills all of the eleven conditions I-XI.

[0492] 10. IL-17A binding polypeptide according to any preceding item, wherein X₂X₆, X₂X₁₀ or X₆X₁₀ is AA.

[0493] 11. IL-17A binding polypeptide according to any preceding item, wherein X₂X₁₇, X₂X₂₀, X₆X₁₇, X₆X₂₀, X₁₀X₁₇ or X₁₀X₂₀ is AW.

[0494] 12. IL-17A binding polypeptide according to any preceding item, wherein X₂X₂₈, X₆X₂₈ or X₁₀X₂₈ is AR.

[0495] 13. IL-17A binding polypeptide according to any preceding item, wherein X₁₇X₂₈ or X₂₀X₂₈ is WR.

[0496] 14. IL-17A binding polypeptide according to any preceding item, wherein X₁₇X₂₀ is WW.

[0497] 15. IL-17A binding polypeptide according to any preceding item, wherein sequence i) is the sequence from position 8 to position 36 in a sequence selected from the group consisting of SEQ ID NO:1-1216.

[0498] 16. IL-17A binding polypeptide according to item 15, wherein sequence i) is the sequence from position 8 to position 36 in a sequence selected from the group consisting of SEQ ID NO:1-66, 1200, 1206 and 1214.

[0499] 17. IL-17A binding polypeptide according to item 16, wherein sequence i) is the sequence from position 8 to position 36 in a sequence selected from the group consisting of SEQ ID NO:1-66.

[0500] 18. IL-17A binding polypeptide according to item 17, wherein sequence i) is the sequence from position 8 to position 36 in a sequence selected from the group consisting of SEQ ID NO:1-35.

[0501] 19. IL-17A binding polypeptide according to item 18, wherein sequence i) is the sequence from position 8 to position 36 in a sequence selected from the group consisting of SEQ ID NO:1-27.

[0502] 20. IL-17A binding polypeptide according to item 19, wherein sequence i) is the sequence from position 8 to position 36 in a sequence selected from the group consisting of SEQ ID NO:1-10.

[0503] 21. IL-17A binding polypeptide according to item 20, wherein sequence i) is the sequence from position 8 to position 36 in a sequence selected from the group consisting of SEQ ID NO:1-7.

[0504] 22. IL-17A binding polypeptide according to item 21, wherein sequence i) is the sequence from position 8 to position 36 in a sequence selected from the group consisting of SEQ ID NO:1-4.

[0505] 23. IL-17A binding polypeptide according to item 22, wherein sequence i) is the sequence from position 8 to position 36 in SEQ ID NO:1.

[0506] 24. IL-17A binding polypeptide according to any preceding item, wherein said IL-17A binding motif forms part of a three-helix bundle protein domain.

[0507] 25. IL-17A binding polypeptide according to item 24, wherein said IL-17A binding motif essentially forms part of two helices with an interconnecting loop, within said three-helix bundle protein domain.

[0508] 26. IL-17A binding polypeptide according to item 25, wherein said three-helix bundle protein domain is selected from bacterial receptor domains.

[0509] 27. IL-17A binding polypeptide according to item 26, wherein said three-helix bundle protein domain is selected from domains of protein A from Staphylococcus aureus or derivatives thereof.

[0510] 28. IL-17A binding polypeptide according to any preceding item, which comprises an amino acid sequence binding module, BMod, selected from:
[0511] iii) K-[BM]-DPSQS XₐX_{b}LLX_{c} EAKKL X_{d}XₑX_{f}Q;
[0512] wherein
   [0513] [BM] is an IL-17A binding motif as defined in any one of items 1-23 provided that X₂₉ is D;
   [0514] Xₐ is selected from A and S;
   [0515] X_{b} is selected from N and E;
   [0516] X_{c} is selected from A, S and C;
   [0517] X_{d} is selected from E, N and S;
   [0518] Xₑ is selected from D, E and S;
   [0519] X_{f} is selected from A and S; and
[0520] iv) an amino acid sequence which has at least 85% identity to a sequence defined by iii).

[0521] 29. IL-17A binding polypeptide according to any one of items 1-27, which comprises an amino acid sequence binding module, BMod, selected from:
[0522] v) K-[BM]-QPEQS XₐX_{b}LLX_{c} EAKKL X_{d}XₑX_{f}Q;
[0523] wherein
   [0524] [BM] is an IL-17A binding motif as defined in any one of items 1-23 provided that X₂₉ is R;
   [0525] Xₐ is selected from A and S;
   [0526] X_{b} is selected from N and E;
   [0527] X_{c} is selected from A, S and C;
   [0528] X_{d} is selected from E, N and S;
   [0529] Xₑ is selected from D, E and S;
   [0530] X_{f} is selected from A and S; and
[0531] vi) an amino acid sequence which has at least 85% identity to a sequence defined by v).

[0532] 30. IL-17A binding polypeptide according to item 28 or 29, wherein Xₐ in sequence iii) or v) is A.

[0533] 31. IL-17A binding polypeptide according to item 28 or 29, wherein Xₐ in sequence iii) or v) is S.

[0534] 32. IL-17A binding polypeptide according to any one of items 28-31, wherein X_{b} in sequence iii) or v) is N.

[0535] 33. IL-17A binding polypeptide according to any one of items 28-31, wherein X_{b} in sequence iii) or v) is E.

[0536] 34. IL-17A binding polypeptide according to any one of items 28-33, wherein X_{c} in sequence iii) or v) is A.

[0537] 35. IL-17A binding polypeptide according to any one of items 28-33, wherein X_{c} in sequence iii) or v) is S.

[0538] 36. IL-17A binding polypeptide according to any one of items 28-33, wherein X_{c} in sequence iii) or v) is C.

[0539] 37. IL-17A binding polypeptide according to any one of items 28-36, wherein X_{d} in sequence iii) or v) is E.

[0540] 38. IL-17A binding polypeptide according to any one of items 28-36, wherein X_{d} in sequence iii) or v) is N.

[0541] 39. IL-17A binding polypeptide according to any one of items 28-36, wherein X_{d} in sequence iii) or v) is S.

[0542] 40. IL-17A binding polypeptide according to any one of items 28-39, wherein Xₑ in sequence iii) or v) is D.

[0543] 41. IL-17A binding polypeptide according to any one of items 28-39, wherein Xₑ in sequence iii) or v) is E.

[0544] 42. IL-17A binding polypeptide according to any one of items 28-39, wherein Xₑ in sequence iii) or v) is S.

[0545] 43. IL-17A binding polypeptide according to any one of items 37 and 39-42, wherein X_{d}Xₑ in sequence iii) or v) is selected from EE, ES, SD, SE and SS.

[0546] 44. IL-17A binding polypeptide according to item 43, wherein X_{d}Xₑ in sequence iii) or v) is ES.

[0547] 45. IL-17A binding polypeptide according to item 43, wherein X_{d}Xₑ in sequence iii) or v) is SE.

[0548] 46. IL-17A binding polypeptide according to item 43, wherein X_{d}Xₑ in sequence iii) or v) is SD.

[0549] 47. IL-17A binding polypeptide according to any one of items 28-46, wherein X_{f} in sequence iii) or v) is A.

[0550] 48. IL-17A binding polypeptide according to any one of items 28-46, wherein X_{f} in sequence iii) or v) is S.

[0551] 49. IL-17A binding polypeptide according to item 28 or 29, wherein, in sequence iii) or v), Xₐ is A; X_{b} is N; X_{c} is A and X_{f} is A.

[0552] 50. IL-17A binding polypeptide according to item 28 or 29, wherein, in sequence iii) or v), Xₐ is S; X_{b} is E; X_{c} is A and X_{f} is A.

[0553] 51. IL-17A binding polypeptide according to item 28 or 29, wherein, in sequence iii) or v), Xₐ is A; X_{b} is N; X_{c} is C and X_{f} is A.

[0554] 52. IL-17A binding polypeptide according to item 28 or 29, wherein, in sequence iii) or v), Xₐ is S; X_{b} is E; X_{c} is S and X_{f} is S.

[0555] 53. IL-17A binding polypeptide according to item 28 or 29, wherein, in sequence iii) or v), Xₐ is S; X_{b} is E; X_{c} is S and X_{f} is A.

[0556] 54. IL-17A binding polypeptide according to item 28 or 29, wherein, in sequence iii) or v), Xₐ is S; X_{b} is E; X_{c} is A and X_{f} is S.

[0557] 55. IL-17A binding polypeptide according to item 28 or 29, wherein, in sequence iii) or v), Xₐ is S; X_{b} is E; X_{c} is C and X_{f} is S.

[0558] 56. IL-17A binding polypeptide according to item 49, wherein, in sequence iii) or v), Xₐ is A; X_{b} is N; X_{c} is A; X_{d}Xₑ is ND and X_{f} is A.

[0559] 57. IL-17A binding polypeptide according to item 50, wherein, in sequence iii) or v), Xₐ is S; X_{b} is E; X_{c} is A; X_{d}Xₑ is ND and X_{f} is A.

[0560] 58. IL-17A binding polypeptide according to item 51, wherein, in sequence iii) or v), Xₐ is A; X_{b} is N; X_{c} is C; X_{d}Xₑ is ND and X_{f} is A.

[0561] 59. IL-17A binding polypeptide according to item 52, wherein, in sequence iii) or v), Xₐ is S; X_{b} is E; X_{c} is S; X_{d}Xₑ is ND and X_{f} is S.

[0562] 60. IL-17A binding polypeptide according to item 53, wherein, in sequence iii) or v), Xₐ is S; X_{b} is E; X_{c} is S; X_{d}Xₑ is ND and X_{f} is A.

[0563] 61. IL-17A binding polypeptide according to item 55, wherein, in sequence iii) or v), Xₐ is S; X_{b} is E; X_{c} is C; X_{d}Xₑ is ND and X_{f} is S.

[0564] 62. IL-17A binding polypeptide according to item 49, wherein, in sequence iii) or v), Xₐ is A; X_{b} is N; X_{c} is A; X_{d}Xₑ is SE and X_{f} is A.

[0565] 63. IL-17A binding polypeptide according to item 50, wherein, in sequence iii) or v), Xₐ is S; X_{b} is E; X_{c} is A; X_{d}Xₑ is SE and X_{f} is A.

[0566] 64. IL-17A binding polypeptide according to item 51, wherein, in sequence iii) or v), Xₐ is A; X_{b} is N; X_{c} is C; X_{d}Xₑ is SE and X_{f} is A.

[0567] 65. IL-17A binding polypeptide according to item 52, wherein, in sequence iii) or v), Xₐ is S; X_{b} is E; X_{c} is S; X_{d}Xₑ is SE and X_{f} is S.

[0568] 66. IL-17A binding polypeptide according to item 54, wherein, in sequence iii) or v), Xₐ is S; X_{b} is E; X_{c} is A; X_{d}Xₑ is SE and X_{f} is S.

[0569] 67. IL-17A binding polypeptide according to item 55, wherein, in sequence iii) or v), Xₐ is S; X_{b} is E; X_{c} is C; X_{d}Xₑ is SE and X_{f} is S.

[0570] 68. IL-17A binding polypeptide according to item 49, wherein, in sequence iii) or v), Xₐ is A; X_{b} is N; X_{c} is A; X_{d}Xₑ is ES and X_{f} is A.

[0571] 69. IL-17A binding polypeptide according to item 50, wherein, in sequence iii) or v), Xₐ is S; X_{b} is E; X_{c} is A; X_{d}Xₑ is ES and X_{f} is A.

[0572] 70. IL-17A binding polypeptide according to item 51, wherein, in sequence iii) or v), Xₐ is A; X_{b} is N; X_{c} is C; X_{d}Xₑ is ES and X_{f} is A.

[0573] 71. IL-17A binding polypeptide according to item 52, wherein, in sequence iii) or v), Xₐ is S; X_{b} is E; X_{c} is S; X_{d}Xₑ is ES and X_{f} is S.

[0574] 72. IL-17A binding polypeptide according to item 55, wherein, in sequence iii) or v), Xₐ is S; X_{b} is E; X_{c} is C; X_{d}Xₑ is ES and X_{f} is S.

[0575] 73. IL-17A binding polypeptide according to item 49, wherein, in sequence iii) or v), Xₐ is A; X_{b} is N; X_{c} is A; X_{d}Xₑ is SD and X_{f} is A.

[0576] 74. IL-17A binding polypeptide according to item 50, wherein, in sequence iii) or v), Xₐ is S; X_{b} is E; X_{c} is A; X_{d}Xₑ is SD and X_{f} is A.

[0577] 75. IL-17A binding polypeptide according to item 51, wherein, in sequence iii) or v), Xₐ is A; X_{b} is N; X_{c} is C; X_{d}Xₑ is SD and X_{f} is A.

[0578] 76. IL-17A binding polypeptide according to item 52, wherein, in sequence iii) or v), Xₐ is S; X_{b} is E; X_{c} is S; X_{d}Xₑ is SD and X_{f} is S.

[0579] 77. IL-17A binding polypeptide according to item 54, wherein, in sequence iii) or v), Xₐ is S; X_{b} is E; X_{c} is A; X_{d}Xₑ is SD and X_{f} is S.

[0580] 78. IL-17A binding polypeptide according to item 55, wherein, in sequence iii) or v), Xₐ is S; X_{b} is E; X_{c} is C; X_{d}Xₑ is SD and X_{f} is S.

[0581] 79. IL-17A binding polypeptide according to item 28, wherein said sequence iii) is the sequence from position 7 to position 55 in a sequence selected from the group consisting of SEQ ID NO:1-1216.

[0582] 80. IL-17A binding polypeptide according to item 79, wherein sequence iii) is the sequence from position 7 to position 55 in a sequence selected from the group consisting of SEQ ID NO:1-66, 1200, 1206 and 1214.

[0583] 81. IL-17A binding polypeptide according to item 80, wherein sequence iii) is the sequence from position 7 to position 55 in a sequence selected from the group consisting of SEQ ID NO:1-66.

[0584] 82. IL-17A binding polypeptide according to item 81, wherein sequence iii) is the sequence from position 7 to position 55 in a sequence selected from the group consisting of SEQ ID NO:1-35.

[0585] 83. IL-17A binding polypeptide according to item 82, wherein sequence iii) is the sequence from position 7 to position 55 in a sequence selected from the group consisting of SEQ ID NO:1-27.

[0586] 84. IL-17A binding polypeptide according to item 83, wherein sequence iii) is the sequence from position 7 to position 55 in a sequence selected from the group consisting of SEQ ID NO:1-10.

[0587] 85. IL-17A binding polypeptide according to item 84, wherein sequence iii) is the sequence from position 7 to position 55 in a sequence selected from the group consisting of SEQ ID NO:1-7.

[0588] 86. IL-17A binding polypeptide according to item 85, wherein sequence iii) is the sequence from position 7 to position 55 in a sequence selected from the group consisting of SEQ ID NO:1-4.

[0589] 87. IL-17A binding polypeptide according to item 86, wherein sequence iii) the sequence from position 7 to position 55 in SEQ ID NO:1.

[0590] 88. IL-17A binding polypeptide according to any preceding item, which comprises an amino acid sequence selected from:
[0591] vii) YA-[BMod]-AP;
[0592] wherein [BMod] is an IL-17A binding module as defined in any one of items 28-87; and
[0593] viii) an amino acid sequence which has at least 86% identity to a sequence defined by vii).

[0594] 89. IL-17A binding polypeptide according to any one of items 1-87, which comprises an amino acid sequence selected from:
[0595] ix) FA-[BMod]-AP;
[0596] wherein [BMod] is an IL-17A binding module as defined in any one of items 28-87; and
[0597] x) an amino acid sequence which has at least 86% identity to a sequence defined by ix).

[0598] 90. IL-17A binding polypeptide according to any one of items 1-87, which comprises an amino acid sequence selected from:
[0599] xi) FN-[BMod]-AP;
[0600] wherein [BMod] is an IL-17A binding module as defined in any one of items 28-87; and
[0601] xii) an amino acid sequence which has at least 86% identity to a sequence defined by xi).

[0602] 91. IL-17A binding polypeptide according to any preceding item, which comprises an amino acid sequence selected from:

ADNNFNK-[BM]-DPSQSANLLSEAKKLNESQAPK;
ADNKFNK-[BM]-DPSQSANLLAEAKKLNDAQAPK;
ADNKFNK-[BM]-DPSVSKEILAEAKKLNDAQAPK;
ADAQQNNFNK-[BM]-DPSQSTNVLGEAKKLNESQAPK;
AQHDE-[BM]-DPSQSANVLGEAQKLNDSQAPK;
VDNKFNK-[BM]-DPSQSANLLAEAKKLNDAQAPK;
AEAKYAK-[BM]-DPSESSELLSEAKKLNKSQAPK;
VDAKYAK-[BM]-DPSQSSELLAEAKKLNDAQAPK;
VDAKYAK-[BM]-DPSQSSELLAEAKKLNDSQAPK;
AEAKYAK-[BM]-DPSQSSELLSEAKKLNDSQAPK;
AEAKYAK-[BM]-DPSQSSELLSEAKKLNDSQAP;
AEAKYAK-[BM]-DPSQSSELLSEAKKLNDAQAPK;
AEAKYAK-[BM]-DPSQSSELLSEAKKLNDAQAP;
AEAKFAK-[BM]-DPSQSSELLSEAKKLNDSQAPK;
AEAKFAK-[BM]-DPSQSSELLSEAKKLNDSQAP;
AEAKYAK-[BM]-DPSQSSELLAEAKKLNDAQAPK;
AEAKYAK-[BM]-DPSQSSELLSEAKKLSESQAPK;
AEAKYAK-[BM]-DPSQSSELLSEAKKLSESQAP;
AEAKFAK-[BM]-DPSQSSELLSEAKKLSESQAPK;
AEAKFAK-[BM]-DPSQSSELLSEAKKLSESQAP;
AEAKYAK-[BM]-DPSQSSELLAEAKKLSEAQAPK;
AEAKYAK-[BM]-QPEQSSELLSEAKKLSESQAPK;
AEAKYAK-[BM]-DPSQSSELLSEAKKLESSQAPK;
AEAKYAK-[BM]-DPSQSSELLSEAKKLESSQAP;
AEAKYAK-[BM]-DPSQSSELLAEAKKLESAQAPK;
AEAKYAK-[BM]-QPEQSSELLSEAKKLESSQAPK;
AEAKYAK-[BM]-DPSQSSELLSEAKKLSDSQAPK;
AEAKYAK-[BM]-DPSQSSELLSEAKKLSDSQAP;
AEAKYAK-[BM]-DPSQSSELLAEAKKLSDSQAPK;
AEAKYAK-[BM]-DPSQSSELLAEAKKLSDAQAPK;
AEAKYAK-[BM]-QPEQSSELLSEAKKLSDSQAPK;
VDAKYAK-[BM]-DPSQSSELLSEAKKLNDSQAPK;
VDAKYAK-[BM]-DPSQSSELLSEAKKLSESQAPK;
VDAKYAK-[BM]DPSQSSELLAEAKKLSEAQAPK;
VDAKYAK-[BM]-QPEQSSELLSEAKKLSESQAPK;
VDAKYAK-[BM]DPSQSSELLSEAKKLESSQAPK;
VDAKYAK-[BM]DPSQSSELLAEAKKLESAQAPK;
VDAKYAK-[BM]-QPEQSSELLSEAKKLESSQAPK;
VDAKYAK-[BM]DPSQSSELLSEAKKLSDSQAPK;
VDAKYAK-[BM]DPSQSSELLAEAKKLSDSQAPK;
VDAKYAK-[BM]DPSQSSELLAEAKKLSDAQAPK;
VDAKYAK-[BM]-QPEQSSELLSEAKKLSDSQAPK;
VDAKYAK-[BM]DPSQSSELLAEAKKLNKAQAPK;
AEAKYAK-[BM]DPSQSSELLAEAKKLNKAQAPK; and
ADAKYAK-[BM]DPSQSSELLSEAKKLNDSQAPK;

wherein [BM] is an IL-17A binding motif as defined in any one of items 1-23.

[0603] 92. IL-17A binding polypeptide according to any preceding item, which comprises an amino acid sequence selected from:

| | |
|---|---|
| xiii) | VDAKYAK-[BM]-DPSQSSELLSEAKKLNDSQAPK; |

[0604] wherein [BM] is an IL-17A binding motif as defined in any one of items 1-23; and
[0605] xiv) an amino acid sequence which has at least 86% identity to the sequence defined in xiii).

[0606] 93. IL-17A binding polypeptide according to item 92, wherein sequence xiii) is selected from SEQ ID NO:1-1216.

[0607] 94. IL-17A binding polypeptide according to item 93, wherein sequence xiii) is selected from SEQ ID NO:1-66, 1200, 1206 and 1214.
[0608] 95. IL-17A binding polypeptide according to item 94, wherein sequence xiii) is selected from SEQ ID NO:1-66.

[0609] 96. IL-17A binding polypeptide according to item 95, wherein sequence xiii) is selected from SEQ ID NO:1-35.

[0610] 97. IL-17A binding polypeptide according to item 96, wherein sequence xiii) is selected from SEQ ID NO:1-27.

[0611] 98. IL-17A binding polypeptide according to item 97, wherein sequence xiii) is selected from SEQ ID NO:1-10.

[0612] 99. IL-17A binding polypeptide according to item 98, wherein sequence xiii) is selected from SEQ ID NO:1-7.

[0613] 100. IL-17A binding polypeptide according to item 99, wherein sequence xiii) is selected from SEQ ID NO:1-4.

[0614] 101. IL-17A binding polypeptide according to item 100, wherein sequence xiii) is SEQ ID NO:1.

[0615] 102. IL-17A binding polypeptide according to any one of items 1-91, which comprises an amino acid sequence selected from:

| | |
|---|---|
| xv) | AEAKYAK-[BM]-DPSQSSELLSEAKKLNDSQAPK; |

[0616] wherein [BM] is an IL-17A binding motif as defined in any one of items 1-23; and
[0617] xvi) an amino acid sequence which has at least 86% identity to the sequence defined in xv).

[0618] 103. IL-17A binding polypeptide according to item 102, wherein sequence xv) is selected from SEQ ID NO:1217-1222.

[0619] 104. IL-17A binding polypeptide according to item 103, wherein sequence xv) is selected from SEQ ID NO:1218-1222.

[0620] 105. IL-17A binding polypeptide according to item 104, wherein sequence xv) is selected from SEQ ID NO:1219-1222.

[0621] 106. IL-17A binding polypeptide according to item 105, wherein sequence xv) is selected from SEQ ID NO:1219 and SEQ ID NO:1222.

[0622] 107. IL-17A binding polypeptide according to item 106, wherein sequence xv) is SEQ ID NO:1219.

[0623] 108. IL-17A binding polypeptide according to any preceding item, which is capable of binding to IL-17A such that the K_{D} value of the interaction is at most 1×10⁻⁶ M, such as at most 1×10⁻⁷ M, such as at most 1×10⁻⁸ M, such as at most 1×10⁻⁹ M.

[0624] 109. IL-17A binding polypeptide according to any preceding item, which is capable of binding to an IL-17A molecule selected from the group consisting of human IL-17A and murine IL-17A.

[0625] 110. IL-17A binding polypeptide according to item 109, which is capable of binding to human IL-17A.

[0626] 111. IL-17A binding polypeptide according to item 109, which is capable of binding to murine IL-17A.

[0627] 112. IL-17A binding polypeptide according to any one of items 109-111, which is capable of binding to human IL-17A and to murine IL-17A.

[0628] 113. IL-17A binding polypeptide according to any one of items 109, 110 and 112, wherein said human IL-17A comprises the amino acid sequence SEQ ID NO:1226 or an antigenically effective fragment thereof.

[0629] 114. IL-17A binding polypeptide according to any one of items 109, 111 and 112, wherein said murine IL-17A comprises the amino acid sequence SEQ ID NO:1227 or an antigenically effective fragment thereof.

[0630] 115. IL-17A binding polypeptide according to any preceding item which comprises additional amino acids at the C-terminal and/or N-terminal end.

[0631] 116. IL-17A binding polypeptide according to item 115, wherein said additional amino acid(s) improve(s) and/or simplify/simplifies production, purification, stabilization in vivo or in vitro, coupling or detection of the polypeptide.

[0632] 117. IL-17A binding polypeptide according to any preceding item in multimeric form, comprising at least two IL-17A binding polypeptide monomer units, whose amino acid sequences may be the same or different.

[0633] 118. IL-17A binding polypeptide according to item 117, wherein said IL-17A binding polypeptide monomer units are covalently coupled together.

[0634] 119. IL-17A binding polypeptide according to item 118, wherein the IL-17A binding polypeptide monomer units are expressed as a fusion protein.

[0635] 120. IL-17A binding polypeptide according to any one of items 117-119, in dimeric form.

[0636] 121. Fusion protein or conjugate comprising
[0637] a first moiety consisting of an IL-17A binding polypeptide according to any preceding item; and
[0638] a second moiety consisting of a polypeptide having a desired biological activity.

[0639] 122. Fusion protein or conjugate according to item 121, wherein said desired biological activity is a therapeutic activity.

[0640] 123. Fusion protein or conjugate according to item 121, wherein said desired biological activity is a binding activity.

[0641] 124. Fusion protein or conjugate according to item 123, wherein said binding activity is albumin binding activity which increases in vivo half-life of the fusion protein or conjugate.

[0642] 125. Fusion protein or conjugate according to item 124, comprising two IL-17A binding polypeptides, each as defined in any one of items 1-116, with an albumin binding moiety between them.

[0643] 126. Fusion protein or conjugate according to item 125, which is capable of binding to IL-17A such that the K_{D} value of the interaction is at most 1×10⁻¹⁰ M, such as at most 1×10⁻¹¹ M, such as at most 1×10⁻¹² M, such as at most 1×10⁻¹³ M.

[0644] 127. Fusion protein or conjugate according to any one of items 124-126, wherein said second moiety comprises the albumin binding domain of streptococcal protein G or a derivative thereof.

[0645] 128. Fusion protein or conjugate according to item 123, wherein said binding activity acts to inhibit a biological activity.

[0646] 129. Fusion protein or conjugate according to item 123, wherein said binding activity acts to stimulate a biological activity.

[0647] 130. Fusion protein or conjugate according to item 121, wherein said desired biological activity is an enzymatic activity.

[0648] 131. Fusion protein or conjugate according to item 122, wherein the second moiety is a therapeutically active polypeptide.

[0649] 132. Fusion protein or conjugate according to item 131, wherein the second moiety is an immune response modifying agent, for example an anti-inflammatory agent.

[0650] 133. Fusion protein or conjugate according to any one of items 121-122 and 130-132, wherein the second moiety is selected from the group consisting of human endogenous enzymes, hormones, growth factors, chemokines, cytokines and lymphokines, and agonists, antagonists and inhibitors thereof.

[0651] 134. Fusion protein or conjugate according to item 131, wherein the second moiety is a toxic compound.

[0652] 135. Fusion protein or conjugate according to item 123, wherein said binding activity is binding to an immune response associated factor, for example an inflammation-associated factor.

[0653] 136. Complex, comprising at least one IL-17A binding polypeptide according to any one of items 1-117 or at least one fusion protein or conjugate according to any one of items 121-135, and at least one antibody or an antigen binding fragment thereof.

[0654] 137. Complex according to item 136, wherein said at least one antibody or antigen binding fragment thereof is selected from the group consisting of full-length antibodies, Fab fragments, Fab′ fragments, F(ab′)₂ fragments, Fc fragments, Fv fragments, single chain Fv fragments, (scFv)₂ and domain antibodies.

[0655] 138. Complex according to item 137, wherein said at least one antibody or antigen binding fragment thereof is selected from the group consisting of full-length antibodies, Fab fragments and scFv fragments.

[0656] 139. Complex according to item 138, wherein said at least one antibody or antigen binding fragment thereof is a full-length antibody.

[0657] 140. Complex according to any one of items 136-139, wherein said antibody or antigen binding fragment thereof is a monoclonal antibody or an antigen binding fragment thereof.

[0658] 141. Complex according to any one of items 136-140, wherein said antibody or antigen binding fragment thereof is selected from the group consisting of human antibodies, humanized antibodies and chimeric antibodies, and antigen-binding fragments thereof.

[0659] 142. Complex according to item 141, wherein said antibody or antigen binding fragment thereof is a human or humanized antibody, or an antigen binding fragment thereof.

[0660] 143. Complex according to any one of items 136-142, wherein said antibody or antigen binding fragment thereof has affinity for an antigen, such as selected from the group consisting of an antigen associated with an angiogenesis related disorder and an antigen associated with the immune response or with a disorder of the immune system.

[0661] 144. Complex according to item 143, wherein said antigen is associated with an angiogenesis related disorder.

[0662] 145. Complex according to item 143, wherein said antigen is associated with the immune response or with a disorder of the immune system, for example associated with inflammation.

[0663] 146. Complex according to any one of items 136-145, which is a fusion protein or a conjugate.

[0664] 147. Complex according to any one of items 136-146, wherein said IL-17A binding polypeptide is attached to the N-terminus or C-terminus of the heavy chain of said antibody or antigen binding fragment thereof.

[0665] 148. Complex according to any one of items 136-146, wherein said IL-17A binding polypeptide is attached to the N-terminus or C-terminus of the light chain of said antibody or antigen binding fragment thereof.

[0666] 149. Complex according to any one of items 136-146, wherein said IL-17A binding polypeptide is attached to the N-terminus and/or C-terminus of the light chain and heavy chain of said antibody or antigen binding fragment thereof.

[0667] 150. Complex according to any one of items 146-149, which is a fusion protein.

[0668] 151. IL-17A binding polypeptide, fusion protein, conjugate or complex according to any preceding item, further comprising at least one linker, for example selected from the group consisting of non-peptidic linkers, flexible amino acid linkers, rigid amino acid linkers and cleavable amino acid linkers.

[0669] 152. Fusion protein or conjugate according item 151, wherein said linker is arranged between said first moiety and said second moiety.

[0670] 153. Complex according to item 151, wherein said linker is arranged between said IL-17A binding polypeptide and said antibody or antigen binding fragment thereof.

[0671] 154. IL-17A binding polypeptide, fusion protein, conjugate or complex according any one of items 151-153, wherein said linker is a flexible linker comprising amino acid residues selected from the group consisting of glycine, serine and threonine.

[0672] 155. IL-17A binding polypeptide, fusion protein, conjugate or complex according to item 154, wherein said linker comprises a sequence with a general formula selected from

(GₙSₘ)ₚ and (SₙGₘ)ₚ,

wherein, independently,

[0673] n=1-7,

[0674] m=0-7,

[0675] n+m≦8 and

[0676] p=1-10.

[0677] 156. IL-17A binding polypeptide, fusion protein, conjugate or complex according to item 155, wherein n=1-5.

[0678] 157. IL-17A binding polypeptide, fusion protein, conjugate or complex according to any one of items 155-156, wherein m=0-5.

[0679] 158. IL-17A binding polypeptide, fusion protein, conjugate or complex according to any one of items 155-157, wherein p=1-5.

[0680] 159. IL-17A binding polypeptide, fusion protein, conjugate or complex according to any one of items 156-158, wherein n=4, m=1 and p=1-4.

[0681] 160. IL-17A binding polypeptide, fusion protein, conjugate or complex according to item 159, wherein said linker comprises a sequence selected from the group consisting of G₄S, (G₄S)₂, (G₄S)₃ and (G₄S)₄.

[0682] 161. IL-17A binding polypeptide, fusion protein, conjugate or complex according to item 160, wherein said linker comprises the sequence G₄S.

[0683] 162. IL-17A binding polypeptide, fusion protein, conjugate or complex according to any one of items 155-159, wherein said general formula is GT(GₙSₘ)ₚ.

[0684] 163. IL-17A binding polypeptide, fusion protein, conjugate or complex according to item 162, wherein said linker comprises the sequence GTG₄S.

[0685] 164. IL-17A binding polypeptide, fusion protein, conjugate or complex according to any preceding item, further comprising a label.

[0686] 165. IL-17A binding polypeptide, fusion protein, conjugate or complex according to item 164, wherein said label is selected from the group consisting of fluorescent dyes and metals, chromophoric dyes, chemiluminescent compounds and bioluminescent proteins, enzymes, radionuclides and particles.

[0687] 166. IL-17A binding polypeptide, fusion protein, conjugate or complex according to any preceding item, comprising a chelating environment provided by a polyaminopolycarboxylate chelator conjugated to the IL-17A binding polypeptide via a thiol group of a cysteine residue or an amine group of a lysine residue.

[0688] 167. IL-17A binding polypeptide, fusion protein, conjugate or complex according to any preceding item, comprising one or more polyethylene glycol moieties.

[0689] 168. Polynucleotide encoding a polypeptide according to any one of items 1-163.

[0690] 169. Expression vector comprising a polynucleotide according to item 168.

[0691] 170. Host cell comprising an expression vector according to item 169.

[0692] 171. Method of producing a polypeptide according to any one of items 1-163, comprising
[0693] culturing a host cell according to item 170 under conditions permissive of expression of said polypeptide from said expression vector, and
[0694] isolating said polypeptide.

[0695] 172. Composition comprising an IL-17A binding polypeptide, fusion protein, conjugate or complex according to any one of items 1-167 and at least one pharmaceutically acceptable excipient or carrier.

[0696] 173. Composition according to item 172, further comprising at least one additional active agent, such as an agent selected from the group consisting of therapeutically active polypeptides, immune response modifying agents, anti-inflammatory agents and toxic compounds.

[0697] 174. IL-17A binding polypeptide, fusion protein, conjugate or complex according to any one of items 1-167 or a composition according to any one of items 172-173 for oral, topical, intravenous, intraperitoneal, subcutaneous, pulmonary, transdermal, intramuscular, intranasal, buccal, sublingual or suppository administration, such as for oral administration or such as for topical administration.

[0698] 175. IL-17A binding polypeptide, fusion protein, conjugate or complex according to any one of items 1-167 or a composition according to any one of items 172-173 for use as a medicament, a diagnostic agent or a prognostic agent.

[0699] 176. IL-17A binding polypeptide, fusion protein, conjugate, complex or composition for use according to item 175, wherein said polypeptide, fusion protein, conjugate, complex or composition modulates IL-17A function in vivo.

[0700] 177. IL-17A binding polypeptide, fusion protein, conjugate, complex or composition for use according to any one of items 175-176, wherein said polypeptide, fusion protein, conjugate, complex or composition inhibits IL-17A signaling.

[0701] 178. IL-17A binding polypeptide, fusion protein, conjugate, complex or composition for use according to any one of items 175-177, wherein said polypeptide, fusion protein, conjugate, complex or composition blocks binding of IL-17A to at least one of its cognate receptors.

[0702] 179. IL-17A binding polypeptide, fusion protein, conjugate, complex or composition for use according to any one of items 175-178, in the treatment, diagnosis or prognosis of an IL-17A associated condition.

[0703] 180. IL-17A binding polypeptide, fusion protein, conjugate, complex or composition for use according to item 179, wherein said IL-17A associated condition is selected from the group consisting of inflammatory diseases, autoimmune diseases and cancer.

[0704] 181. IL-17A binding polypeptide, fusion protein, conjugate, complex or composition for use according to item 180, wherein said IL-17A associated condition is selected from the group consisting of inflammatory diseases and autoimmune diseases.

[0705] 182. IL-17A binding polypeptide, fusion protein, conjugate, complex or composition for use according to item 181, wherein said IL-17A associated condition is selected from the group consisting of inflammatory conditions, allergic conditions, hypersensitivity reactions, autoimmune diseases, severe infections and transplant rejections.

[0706] 183. IL-17A binding polypeptide, fusion protein, conjugate, complex or composition for use according to item 182, wherein said IL-17A associated condition is selected from the group consisting of rheumatoid arthritis, ankylosing spondylitis, psoriatic arthritis, psoriasis, multiple sclerosis, systemic lupus erythematosus, uveitis and dry eye disease.

[0707] 184. IL-17A binding polypeptide, fusion protein, conjugate, complex or composition for use according to item 183, wherein said IL-17A associated condition is psoriasis.

[0708] 185. IL-17A binding polypeptide, fusion protein, conjugate or complex for use in prognosis according to item 179, wherein said IL-17A associated condition is cancer, such as a cancer selected from the group consisting of gastric cancers, colorectal cancers, non-small cell lung cancers, hepatocellular carcinomas and adenocarcinomas.

[0709] 186. Method of detecting IL-17A, comprising providing a sample suspected to contain IL-17A, contacting said sample with an IL-17A binding polypeptide, fusion protein, conjugate or complex according to any one of items 1-167 or a composition according to any one of items 172-173, and detecting the binding of the IL-17A binding polypeptide, fusion protein, conjugate, complex or composition to indicate the presence of IL-17A in the sample.

[0710] 187. Method for determining the presence of IL-17A in a subject, the method comprising the steps:
[0711] contacting the subject, or a sample isolated from the subject, with an IL-17A binding polypeptide, fusion protein, conjugate or complex according to any one of items 1-167 or a composition according to any one of items 172-173, and
[0712] obtaining a value corresponding to the amount of the IL-17A binding polypeptide, fusion protein, conjugate, complex or composition that has bound in said subject or to said sample.

[0713] 188. Method according to item 187, further comprising a step of comparing said value to a reference.

[0714] 189. Method according to item 187 or 188, wherein said subject is a mammalian subject, such as a human subject.

[0715] 190. Method according to any one of items 187-189, performed in vivo.

[0716] 191. Method according to any one of items 187-189, performed in vitro.

[0717] 192. Method of treatment of an IL-17A associated condition, comprising administering to a subject in need thereof an effective amount of an IL-17A binding polypeptide, fusion protein, conjugate or complex according to any one of items 1-167 or a composition according to any one of items 172-173.

[0718] 193. Method according to item 192, wherein said IL-17A associated condition is selected from the group consisting of inflammatory diseases, autoimmune diseases and cancer.

[0719] 194. Method according to item 193, wherein said IL-17A associated condition is selected from the group consisting of inflammatory diseases and autoimmune diseases.

[0720] 195. Method according to item 194, wherein said IL-17A associated condition is selected from the group consisting of inflammatory conditions, allergic conditions, hypersensitivity reactions, autoimmune diseases, severe infections and transplant rejections.

[0721] 196. Method according to item 195, wherein said IL-17A associated condition is selected from the group consisting of rheumatoid arthritis, ankylosing spondylitis, psoriatic arthritis, psoriasis, multiple sclerosis, systemic lupus erythematosus, uveitis and dry eye disease.

[0722] 197. Method according to item 196, wherein said IL-17A associated condition is psoriasis.

The application's sequence listing, which the Patent Office published only in electronic form, follows.

SEQUENCE LISTING (1294 sequences)

SEQ ID NO: 1 - protein, 58 aa, ARTIFICIAL SEQUENCE
  Engineered IL-17A binding polypeptide
VDAKYAKEADDAAVEIASLPNLTWDQWYAFIQKLRDDPSQSSELLSEAKKLNDSQAPK

SEQ ID NO: 2 - protein, 58 aa, ARTIFICIAL SEQUENCE
  Engineered IL-17A binding polypeptide
VDAKYAKEADDAAVEIAALPNLTWDQWFAFISKLRDDPSQSSELLSEAKKLNDSQAPK

SEQ ID NO: 3 - protein, 58 aa, ARTIFICIAL SEQUENCE
  Engineered IL-17A binding polypeptide
VDAKYAKEADQAAVEIADLPNLTWAQWYAFIQKLRDDPSQSSELLSEAKKLNDSQAPK

SEQ ID NO: 4 - protein, 58 aa, ARTIFICIAL SEQUENCE
  Engineered IL-17A binding polypeptide
VDAKYAKEADDAAVEIASLPNLTWAQWYAFIQKLRDDPSQSSELLSEAKKLNDSQAPK

SEQ ID NO: 5 - protein, 58 aa, ARTIFICIAL SEQUENCE
  Engineered IL-17A binding polypeptide
VDAKYAKEADAAAVEIAELPNLTWDQWWAFINKLRDDPSQSSELLSEAKKLNDSQAPK

SEQ ID NO: 6 - protein, 58 aa, ARTIFICIAL SEQUENCE
  Engineered IL-17A binding polypeptide
VDAKYAKEADDAALEIADLPNLTWDQWWAFISKLRDDPSQSSELLSEAKKLNDSQAPK

SEQ ID NO: 7 - protein, 58 aa, ARTIFICIAL SEQUENCE
  Engineered IL-17A binding polypeptide
VDAKYAKEADRAAVEIADLPNLTWDQWYAFIEKLRDDPSQSSELLSEAKKLNDSQAPK

SEQ ID NO: 8 - protein, 58 aa, ARTIFICIAL SEQUENCE
  Engineered IL-17A binding polypeptide
VDAKYAKEADDAAYEIAYLPNLTWDQWFAFITKLRDDPSQSSELLSEAKKLNDSQAPK

SEQ ID NO: 9 - protein, 58 aa, ARTIFICIAL SEQUENCE
  Engineered IL-17A binding polypeptide
VDAKYAKEADQAAYEIAFLPNLTWDQWFAFINKLRDDPSQSSELLSEAKKLNDSQAPK

SEQ ID NO: 10 - protein, 58 aa, ARTIFICIAL SEQUENCE
  Engineered IL-17A binding polypeptide
VDAKYAKEADDAAYEIAFLPNLTWDQWWAFIQKLRDDPSQSSELLSEAKKLNDSQAPK

SEQ ID NO: 11 - protein, 58 aa, ARTIFICIAL SEQUENCE
  Engineered IL-17A binding polypeptide
VDAKYAKEADDAAVEIADLPNLTWDQWYAFISKLRDDPSQSSELLSEAKKLNDSQAPK

SEQ ID NO: 12 - protein, 58 aa, ARTIFICIAL SEQUENCE
  Engineered IL-17A binding polypeptide
VDAKYAKEADEAAVEIADLPNLTWDQWYAFIQKLRDDPSQSSELLSEAKKLNDSQAPK

SEQ ID NO: 13 - protein, 58 aa, ARTIFICIAL SEQUENCE
  Engineered IL-17A binding polypeptide
VDAKYAKEADDAAVEIADLPNLTWAQWYAFIGKLRDDPSQSSELLSEAKKLNDSQAPK

SEQ ID NO: 14 - protein, 58 aa, ARTIFICIAL SEQUENCE
  Engineered IL-17A binding polypeptide
VDAKYAKEADDAAIEIASLPNLTWDQWYAFIGKLRDDPSQSSELLSEAKKLNDSQAPK

SEQ ID NO: 15 - protein, 58 aa, ARTIFICIAL SEQUENCE
  Engineered IL-17A binding polypeptide
VDAKYAKEADDAAVEIADLPNLTWDQWFAFIQKLRDDPSQSSELLSEAKKLNDSQAPK

SEQ ID NO: 16 - protein, 58 aa, ARTIFICIAL SEQUENCE
  Engineered IL-17A binding polypeptide
VDAKYAKEADDAAVEIADLPNLTWDQWHAFIQKLRDDPSQSSELLSEAKKLNDSQAPK

SEQ ID NO: 17 - protein, 58 aa, ARTIFICIAL SEQUENCE
  Engineered IL-17A binding polypeptide
VDAKYAKEADDAAYEIAFLPNLTWDQWFAFISKLRDDPSQSSELLSEAKKLNDSQAPK

SEQ ID NO: 18 - protein, 58 aa, ARTIFICIAL SEQUENCE
  Engineered IL-17A binding polypeptide
VDAKYAKEADDAAVEIADLPNLTWDQWYAFITKLRDDPSQSSELLSEAKKLNDSQAPK

SEQ ID NO: 19 - protein, 58 aa, ARTIFICIAL SEQUENCE
  Engineered IL-17A binding polypeptide
VDAKYAKEADLAAVEIADLPNLTWDQWWAFIQKLRDDPSQSSELLSEAKKLNDSQAPK

SEQ ID NO: 20 - protein, 58 aa, ARTIFICIAL SEQUENCE
  Engineered IL-17A binding polypeptide
VDAKYAKEADDAAYEIAYLPNLTWDQWYAFIQKLRDDPSQSSELLSEAKKLNDSQAPK

SEQ ID NO: 21 - protein, 58 aa, ARTIFICIAL SEQUENCE
  Engineered IL-17A binding polypeptide
VDAKYAKEADDAAVEIAALPNLTWDQWWAFIGKLRDDPSQSSELLSEAKKLNDSQAPK

SEQ ID NO: 22 - protein, 58 aa, ARTIFICIAL SEQUENCE
  Engineered IL-17A binding polypeptide
VDAKYAKEADEAAVEIADLPNLTWDQWWAFINKLRDDPSQSSELLSEAKKLNDSQAPK

SEQ ID NO: 23 - protein, 58 aa, ARTIFICIAL SEQUENCE
  Engineered IL-17A binding polypeptide
VDAKYAKEADDAAVEIADLPNLTWDQWYAFIAKLRDDPSQSSELLSEAKKLNDSQAPK

SEQ ID NO: 24 - protein, 58 aa, ARTIFICIAL SEQUENCE
  Engineered IL-17A binding polypeptide
VDAKYAKEADDAAVEIADLPNLTWDQWFAFINKLRDDPSQSSELLSEAKKLNDSQAPK

SEQ ID NO: 25 - protein, 58 aa, ARTIFICIAL SEQUENCE
  Engineered IL-17A binding polypeptide
VDAKYAKEADDAAYEIAFLPNLTWEQWFAFIDKLRDDPSQSSELLSEAKKLNDSQAPK

SEQ ID NO: 26 - protein, 58 aa, ARTIFICIAL SEQUENCE
  Engineered IL-17A binding polypeptide
VDAKYAKEADDAAVEIAYLPNLTWDQWWAFIRKLRDDPSQSSELLSEAKKLNDSQAPK

SEQ ID NO: 27 - protein, 58 aa, ARTIFICIAL SEQUENCE
  Engineered IL-17A binding polypeptide
VDAKYAKEADDAAVEIADLPNLTWDQWWAFILKLRDDPSQSSELLSEAKKLNDSQAPK

SEQ ID NO: 28 - protein, 58 aa, ARTIFICIAL SEQUENCE
  Engineered IL-17A binding polypeptide
VDAKYAKEADDAAFEIAALPNLTWDQWYAFIIKLRDDPSQSSELLSEAKKLNDSQAPK

SEQ ID NO: 29 - protein, 58 aa, ARTIFICIAL SEQUENCE
  Engineered IL-17A binding polypeptide
VDAKYAKEADEAAVEIAELPNLTWDQWYAFIRKLRDDPSQSSELLSEAKKLNDSQAPK

SEQ ID NO: 30 - protein, 58 aa, ARTIFICIAL SEQUENCE
  Engineered IL-17A binding polypeptide
VDAKYAKEADDAALEIAELPNLTWVQWYAFIQKLRDDPSQSSELLSEAKKLNDSQAPK

SEQ ID NO: 31 - protein, 58 aa, ARTIFICIAL SEQUENCE
  Engineered IL-17A binding polypeptide
VDAKYAKEADFAAVEIAELPNLTWDQWYAFIQKLRDDPSQSSELLSEAKKLNDSQAPK

SEQ ID NO: 32 - protein, 58 aa, ARTIFICIAL SEQUENCE
  Engineered IL-17A binding polypeptide
VDAKYAKEADDAAVEIADLPNLTWAQWEAFISKLRDDPSQSSELLSEAKKLNDSQAPK

SEQ ID NO: 33 - protein, 58 aa, ARTIFICIAL SEQUENCE
  Engineered IL-17A binding polypeptide
VDAKYAKEADDAAYEIAGLPNLTWDQWYAFIEKLRDDPSQSSELLSEAKKLNDSQAPK

SEQ ID NO: 34 - protein, 58 aa, ARTIFICIAL SEQUENCE
  Engineered IL-17A binding polypeptide
VDAKYAKEADDAAYEIASLPNLTWDQWWAFIGKLRDDPSQSSELLSEAKKLNDSQAPK

SEQ ID NO: 35 - protein, 58 aa, ARTIFICIAL SEQUENCE
  Engineered IL-17A binding polypeptide
VDAKYAKEADRAAVEIADLPNLTWDQWWAFIEKLRDDPSQSSELLSEAKKLNDSQAPK

SEQ ID NO: 36 - protein, 58 aa, ARTIFICIAL SEQUENCE
  Engineered IL-17A binding polypeptide
VDAKYAKEMDYAQWEIWLLPNLTWDQGHAFISKLIDDPSQSSELLSEAKKLNDSQAPK

SEQ ID NO: 37 - protein, 58 aa, ARTIFICIAL SEQUENCE
  Engineered IL-17A binding polypeptide
VDAKYAKEADDAAVEIADLPNLTWDQWFAFIHKLRDDPSQSSELLSEAKKLNDSQAPK

SEQ ID NO: 38 - protein, 58 aa, ARTIFICIAL SEQUENCE
  Engineered IL-17A binding polypeptide
VDAKYAKEADDAAFEIAMLPNLTWDQWYAFIRKLRDDPSQSSELLSEAKKLNDSQAPK

SEQ ID NO: 39 - protein, 58 aa, ARTIFICIAL SEQUENCE
  Engineered IL-17A binding polypeptide
VDAKYAKEADNAAVEIADLPNLTWVQWYAFIQKLRDDPSQSSELLSEAKKLNDSQAPK

SEQ ID NO: 40 - protein, 58 aa, ARTIFICIAL SEQUENCE
  Engineered IL-17A binding polypeptide
VDAKYAKEADDAAVEIAELPNLTWDQWFAFIQKLRDDPSQSSELLSEAKKLNDSQAPK

SEQ ID NO: 41 - protein, 58 aa, ARTIFICIAL SEQUENCE
  Engineered IL-17A binding polypeptide
VDAKYAKEADDAAVEIASLPNLTWDQWYAFISKLRDDPSQSSELLSEAKKLNDSQAPK

SEQ ID NO: 42 - protein, 58 aa, ARTIFICIAL SEQUENCE
  Engineered IL-17A binding polypeptide
VDAKYAKEADQAAVEIADLPNLTWDQWYAFIQKLRDDPSQSSELLSEAKKLNDSQAPK

SEQ ID NO: 43 - protein, 58 aa, ARTIFICIAL SEQUENCE
  Engineered IL-17A binding polypeptide
VDAKYAKEADDAAVEIAMLPNLTWDQWYAFIQKLRDDPSQSSELLSEAKKLNDSQAPK

SEQ ID NO: 44 - protein, 58 aa, ARTIFICIAL SEQUENCE
  Engineered IL-17A binding polypeptide
VDAKYAKEADNAAVEIADLPNLTWDQWFAFIHKLRDDPSQSSELLSEAKKLNDSQAPK

SEQ ID NO: 45 - protein, 58 aa, ARTIFICIAL SEQUENCE
  Engineered IL-17A binding polypeptide
VDAKYAKEADEAAVEIADLPNLTWDQWYAFIAKLRDDPSQSSELLSEAKKLNDSQAPK

SEQ ID NO: 46 - protein, 58 aa, ARTIFICIAL SEQUENCE
  Engineered IL-17A binding polypeptide
VDAKYAKEADDAAVEIADLPNLTWDQWYAFIQKLRDDPSQSSELLSEAKKLNDSQAPK

SEQ ID NO: 47 - protein, 58 aa, ARTIFICIAL SEQUENCE
  Engineered IL-17A binding polypeptide
VDAKYAKEADDAAVEIAMLPNLTWDQWYAFIGKLRDDPSQSSELLSEAKKLNDSQAPK

SEQ ID NO: 48 - protein, 58 aa, ARTIFICIAL SEQUENCE
  Engineered IL-17A binding polypeptide
VDAKYAKEADRAAMEIAELPNLTWDQWYAFISKLRDDPSQSSELLSEAKKLNDSQAPK

SEQ ID NO: 49 - protein, 58 aa, ARTIFICIAL SEQUENCE
  Engineered IL-17A binding polypeptide
VDAKYAKEADDAAVEIAELPNLTWDQWYAFIGKLRDDPSQSSELLSEAKKLNDSQAPK

SEQ ID NO: 50 - protein, 58 aa, ARTIFICIAL SEQUENCE
  Engineered IL-17A binding polypeptide
VDAKYAKEADNAAVEIAMLPNLTWDQWYAFIGKLRDDPSQSSELLSEAKKLNDSQAPK

SEQ ID NO: 51 - protein, 58 aa, ARTIFICIAL SEQUENCE
  Engineered IL-17A binding polypeptide
VDAKYAKEADDAAVEIAALPNLTWDQWYAFIGKLRDDPSQSSELLSEAKKLNDSQAPK

SEQ ID NO: 52 - protein, 58 aa, ARTIFICIAL SEQUENCE
  Engineered IL-17A binding polypeptide
VDAKYAKEADNAAVEIASLPNLTWDQWFAFIGKLRDDPSQSSELLSEAKKLNDSQAPK

SEQ ID NO: 53 - protein, 58 aa, ARTIFICIAL SEQUENCE
  Engineered IL-17A binding polypeptide
VDAKYAKEADDAAVEIALLPNLTWDQWYAFIGKLRDDPSQSSELLSEAKKLNDSQAPK

SEQ ID NO: 54 - protein, 58 aa, ARTIFICIAL SEQUENCE
  Engineered IL-17A binding polypeptide
VDAKYAKEADDAAVEIASLPNLTWDQWFAFISKLRDDPSQSSELLSEAKKLNDSQAPK

SEQ ID NO: 55 - protein, 58 aa, ARTIFICIAL SEQUENCE
  Engineered IL-17A binding polypeptide
VDAKYAKEADDAAVEIADLPNLTWDQWFAFIGKLRDDPSQSSELLSEAKKLNDSQAPK

SEQ ID NO: 56 - protein, 58 aa, ARTIFICIAL SEQUENCE
  Engineered IL-17A binding polypeptide
VDAKYAKEADDAAVEIADLPNLTWAQWFAFIQKLRDDPSQSSELLSEAKKLNDSQAPK

SEQ ID NO: 57 - protein, 58 aa, ARTIFICIAL SEQUENCE
  Engineered IL-17A binding polypeptide
VDAKYAKEADDAAVEIAALPNLTWDQWFAFIQKLRDDPSQSSELLSEAKKLNDSQAPK

SEQ ID NO: 58 - protein, 58 aa, ARTIFICIAL SEQUENCE
  Engineered IL-17A binding polypeptide
VDAKYAKEADNAAVEIADLPNLTWDQWYAFIAKLRDDPSQSSELLSEAKKLNDSQAPK

SEQ ID NO: 59 - protein, 58 aa, ARTIFICIAL SEQUENCE
  Engineered IL-17A binding polypeptide
VDAKYAKEADEAAVEIAELPNLTWDQWYAFIGKLRDDPSQSSELLSEAKKLNDSQAPK

SEQ ID NO: 60 - protein, 58 aa, ARTIFICIAL SEQUENCE
  Engineered IL-17A binding polypeptide
VDAKYAKEADNAAMEIADLPNLTWDQWFAFIQKLRDDPSQSSELLSEAKKLNDSQAPK

SEQ ID NO: 61 - protein, 58 aa, ARTIFICIAL SEQUENCE
  Engineered IL-17A binding polypeptide
VDAKYAKEADDAAVEIAALPNLTWDQWYAFIQKLRDDPSQSSELLSEAKKLNDSQAPK

SEQ ID NO: 62 - protein, 58 aa, ARTIFICIAL SEQUENCE
  Engineered IL-17A binding polypeptide
VDAKYAKEADDAAVEIAELPNLTWAQWFAFIGKLRDDPSQSSELLSEAKKLNDSQAPK

SEQ ID NO: 63 - protein, 58 aa, ARTIFICIAL SEQUENCE
  Engineered IL-17A binding polypeptide
VDAKYAKEADEAAVEIADLPNLTWDQWFAFIQKLRDDPSQSSELLSEAKKLNDSQAPK

SEQ ID NO: 64 - protein, 58 aa, ARTIFICIAL SEQUENCE
  Engineered IL-17A binding polypeptide
VDAKYAKEADDAAVEIALLPNLTWDQWYAFINKLRDDPSQSSELLSEAKKLNDSQAPK

SEQ ID NO: 65 - protein, 58 aa, ARTIFICIAL SEQUENCE
  Engineered IL-17A binding polypeptide
VDAKYAKEADNAALEIANLPNLTWDQWWAFITKLRDDPSQSSELLSEAKKLNDSQAPK

SEQ ID NO: 66 - protein, 58 aa, ARTIFICIAL SEQUENCE
  Engineered IL-17A binding polypeptide
VDAKYAKEADMAAVEIAELPNLTWEQWWAFIGKLRDDPSQSSELLSEAKKLNDSQAPK

SEQ ID NO: 67 - protein, 58 aa, ARTIFICIAL SEQUENCE
  Engineered IL-17A binding polypeptide
VDAKYAKEADEAAVEIAMLPNLTWDQWHAFIHKLRDDPSQSSELLSEAKKLNDSQAPK

SEQ ID NO: 68 - protein, 58 aa, ARTIFICIAL SEQUENCE
  Engineered IL-17A binding polypeptide
VDAKYAKEADNAAWEIASLPNLTWDQWFAFIGKLRDDPSQSSELLSEAKKLNDSQAPK

SEQ ID NO: 69 - protein, 58 aa, ARTIFICIAL SEQUENCE
  Engineered IL-17A binding polypeptide
VDAKYAKEADRAAVEIAELPNLTWDQWHAFIGKLRDDPSQSSELLSEAKKLNDSQAPK

SEQ ID NO: 70 - protein, 58 aa, ARTIFICIAL SEQUENCE
  Engineered IL-17A binding polypeptide
VDAKYAKEADDAAMEIADLPNLTWAQWNAFISKLRDDPSQSSELLSEAKKLNDSQAPK

SEQ ID NO: 71 - protein, 58 aa, ARTIFICIAL SEQUENCE
  Engineered IL-17A binding polypeptide
VDAKYAKEADNAAVEIAALPNLTWDQWSAFIQKLRDDPSQSSELLSEAKKLNDSQAPK

SEQ ID NO: 72 - protein, 58 aa, ARTIFICIAL SEQUENCE
  Engineered IL-17A binding polypeptide
VDAKYAKEADEAAVEIAELPNLTWDQWFAFIGKLRDDPSQSSELLSEAKKLNDSQAPK

SEQ ID NO: 73 - protein, 58 aa, ARTIFICIAL SEQUENCE
  Engineered IL-17A binding polypeptide
VDAKYAKEADDAAVEIALLPNLTWAQWFAFIQKLRDDPSQSSELLSEAKKLNDSQAPK

SEQ ID NO: 74 - protein, 58 aa, ARTIFICIAL SEQUENCE
  Engineered IL-17A binding polypeptide
VDAKYAKEADDAAVEIADLPNLTWDQWNAFIRKLRDDPSQSSELLSEAKKLNDSQAPK

SEQ ID NO: 75 - protein, 58 aa, ARTIFICIAL SEQUENCE
  Engineered IL-17A binding polypeptide
VDAKYAKEADNAAIEIALLPNLTWVQWHAFIQKLRDDPSQSSELLSEAKKLNDSQAPK

SEQ ID NO: 76 - protein, 58 aa, ARTIFICIAL SEQUENCE
  Engineered IL-17A binding polypeptide
VDAKYAKEADNAAMEIADLPNLTWAQWHAFIQKLRDDPSQSSELLSEAKKLNDSQAPK

SEQ ID NO: 77 - protein, 58 aa, ARTIFICIAL SEQUENCE
  Engineered IL-17A binding polypeptide
VDAKYAKEADNAAVEIAALPNLTWDQWFAFIHKLRDDPSQSSELLSEAKKLNDSQAPK

SEQ ID NO: 78 - protein, 58 aa, ARTIFICIAL SEQUENCE
  Engineered IL-17A binding polypeptide
VDAKYAKEADDAALEIADLPNLTWDQWFAFISKLRDDPSQSSELLSEAKKLNDSQAPK

SEQ ID NO: 79 - protein, 58 aa, ARTIFICIAL SEQUENCE
  Engineered IL-17A binding polypeptide
VDAKYAKEADQAAVEIADLPNLTWDQWYAFIVKLRDDPSQSSELLSEAKKLNDSQAPK

SEQ ID NO: 80 - protein, 58 aa, ARTIFICIAL SEQUENCE
  Engineered IL-17A binding polypeptide
VDAKYAKEADDAAVEIATLPNLTWDQWSAFIRKLRDDPSQSSELLSEAKKLNDSQAPK

SEQ ID NO: 81 - protein, 58 aa, ARTIFICIAL SEQUENCE
  Engineered IL-17A binding polypeptide
VDAKYAKEADEAAFEIAALPNLTWDQWFAFIRKLRDDPSQSSELLSEAKKLNDSQAPK

SEQ ID NO: 82 - protein, 58 aa, ARTIFICIAL SEQUENCE
  Engineered IL-17A binding polypeptide
VDAKYAKEADDAAVEIAALPNLTWDQWFAFIRKLRDDPSQSSELLSEAKKLNDSQAPK

SEQ ID NO: 83 - protein, 58 aa, ARTIFICIAL SEQUENCE
  Engineered IL-17A binding polypeptide
VDAKYAKEADDAAVEIADLPNLTYDQWFAFIGKLRDDPSQSSELLSEAKKLNDSQAPK

SEQ ID NO: 84 - protein, 58 aa, ARTIFICIAL SEQUENCE
  Engineered IL-17A binding polypeptide
VDAKYAKEADDAAVEIADLPNLTWDQWHAFIIKLRDDPSQSSELLSEAKKLNDSQAPK

SEQ ID NO: 85 - protein, 58 aa, ARTIFICIAL SEQUENCE
  Engineered IL-17A binding polypeptide
VDAKYAKEADDAAFEIAALPNLTWAQWFAFIGKLRDDPSQSSELLSEAKKLNDSQAPK

SEQ ID NO: 86 - protein, 58 aa, ARTIFICIAL SEQUENCE
  Engineered IL-17A binding polypeptide
VDAKYAKEADEAAFEIADLPNLTWVQWFAFIQKLRDDPSQSSELLSEAKKLNDSQAPK

SEQ ID NO: 87 - protein, 58 aa, ARTIFICIAL SEQUENCE
  Engineered IL-17A binding polypeptide
VDAKYAKEADQAAVEIADLPNLTWDQWFAFIGKLRDDPSQSSELLSEAKKLNDSQAPK

SEQ ID NO: 88 - protein, 58 aa, ARTIFICIAL SEQUENCE
  Engineered IL-17A binding polypeptide
VDAKYAKEADDAAMEIAELPNLTWAQWSAFIAKLRDDPSQSSELLSEAKKLNDSQAPK

SEQ ID NO: 89 - protein, 58 aa, ARTIFICIAL SEQUENCE
  Engineered IL-17A binding polypeptide
VDAKYAKEADDAAIEIAELPNLTWDQWYAFIGKLRDDPSQSSELLSEAKKLNDSQAPK

SEQ ID NO: 90 - protein, 58 aa, ARTIFICIAL SEQUENCE
  Engineered IL-17A binding polypeptide
VDAKYAKEADDAAFEIALLPNLTWDQWSAFIQKLRDDPSQSSELLSEAKKLNDSQAPK

SEQ ID NO: 91 - protein, 58 aa, ARTIFICIAL SEQUENCE
  Engineered IL-17A binding polypeptide
VDAKYAKEADEAAMEIAELPNLTWDQWFAFISKLRDDPSQSSELLSEAKKLNDSQAPK

SEQ ID NO: 92 - protein, 58 aa, ARTIFICIAL SEQUENCE
  Engineered IL-17A binding polypeptide
VDAKYAKEADDAAFEIAALPNLTWDQWFAFISKLRDDPSQSSELLSEAKKLNDSQAPK

SEQ ID NO: 93 - protein, 58 aa, ARTIFICIAL SEQUENCE
  Engineered IL-17A binding polypeptide
VDAKYAKEADEAAVEIASLPNLTWDQWHAFIIKLRDDPSQSSELLSEAKKLNDSQAPK

SEQ ID NO: 94 - protein, 58 aa, ARTIFICIAL SEQUENCE
  Engineered IL-17A binding polypeptide
VDAKYAKEADRAAVEIASLPNLTWAQWHAFIQKLRDDPSQSSELLSEAKKLNDSQAPK

SEQ ID NO: 95 - protein, 58 aa, ARTIFICIAL SEQUENCE
  Engineered IL-17A binding polypeptide
VDAKYAKEADNAAVEIAALPNLTWDQWHAFIQKLRDDPSQSSELLSEAKKLNDSQAPK

SEQ ID NO: 96 - protein, 58 aa, ARTIFICIAL SEQUENCE
  Engineered IL-17A binding polypeptide
VDAKYAKEADEAAMEIADLPNLTWVQWSAFISKLRDDPSQSSELLSEAKKLNDSQAPK

SEQ ID NO: 97 - protein, 58 aa, ARTIFICIAL SEQUENCE
  Engineered IL-17A binding polypeptide
VDAKYAKEADEAAVEIATLPNLTWDQWFAFIQKLRDDPSQSSELLSEAKKLNDSQAPK

SEQ ID NO: 98 - protein, 58 aa, ARTIFICIAL SEQUENCE
  Engineered IL-17A binding polypeptide
VDAKYAKEADDAAVEIALLPNLTWDQWHAFIGKLRDDPSQSSELLSEAKKLNDSQAPK

SEQ ID NO: 99 - protein, 58 aa, ARTIFICIAL SEQUENCE
  Engineered IL-17A binding polypeptide
VDAKYAKEADEAAVEIASLPNLTWDQWYAFIRKLRDDPSQSSELLSEAKKLNDSQAPK

SEQ ID NO: 100 - protein, 58 aa, ARTIFICIAL SEQUENCE
  Engineered IL-17A binding polypeptide
VDAKYAKEADDAALEIAELPNLTWDQWYAFIVKLRDDPSQSSELLSEAKKLNDSQAPK

SEQ ID NO: 101 - protein, 58 aa, ARTIFICIAL SEQUENCE
  Engineered IL-17A binding polypeptide
VDAKYAKEADDAAFEIAALPNLTWDQWFAFIQKLRDDPSQSSELLSEAKKLNDSQAPK

SEQ ID NO: 102 - protein, 58 aa, ARTIFICIAL SEQUENCE
  Engineered IL-17A binding polypeptide
VDAKYAKEADDAAVEIADLPNLTWRQWYAFIQKLRDDPSQSSELLSEAKKLNDSQAPK

SEQ ID NO: 103 - protein, 58 aa, ARTIFICIAL SEQUENCE
  Engineered IL-17A binding polypeptide
VDAKYAKEADDAAVEIAELPNLTWDQWFAFIRKLRDDPSQSSELLSEAKKLNDSQAPK

SEQ ID NO: 104 - protein, 58 aa, ARTIFICIAL SEQUENCE
  Engineered IL-17A binding polypeptide
VDAKYAKEADDAAVEIADLPNLTWAQWYAFIVKLRDDPSQSSELLSEAKKLNDSQAPK

SEQ ID NO: 105 - protein, 58 aa, ARTIFICIAL SEQUENCE
  Engineered IL-17A binding polypeptide
VDAKYAKEADDAAMEIADLPNLTWDQWFAFISKLRDDPSQSSELLSEAKKLNDSQAPK

SEQ ID NO: 106 - protein, 58 aa, ARTIFICIAL SEQUENCE
  Engineered IL-17A binding polypeptide
VDAKYAKEADDAAVEIADLPNLTWRQWFAFIQKLRDDPSQSSELLSEAKKLNDSQAPK

SEQ ID NO: 107 - protein, 58 aa, ARTIFICIAL SEQUENCE
  Engineered IL-17A binding polypeptide
VDAKYAKEADDAAVEIAALPNLTWHQWNAFIQKLRDDPSQSSELLSEAKKLNDSQAPK

SEQ ID NO: 108 - protein, 58 aa, ARTIFICIAL SEQUENCE
  Engineered IL-17A binding polypeptide
VDAKYAKEADQAAVEIAALPNLTWRQWYAFIGKLRDDPSQSSELLSEAKKLNDSQAPK

SEQ ID NO: 109 - protein, 58 aa, ARTIFICIAL SEQUENCE
  Engineered IL-17A binding polypeptide
VDAKYAKEADDAAVEIADLPNLTWAQWHAFIQKLRDDPSQSSELLSEAKKLNDSQAPK

SEQ ID NO: 110 - protein, 58 aa, ARTIFICIAL SEQUENCE
  Engineered IL-17A binding polypeptide
VDAKYAKEADEAAVEIAALPNLTWHQWHAFISKLRDDPSQSSELLSEAKKLNDSQAPK

SEQ ID NO: 111 - protein, 58 aa, ARTIFICIAL SEQUENCE
  Engineered IL-17A binding polypeptide
VDAKYAKEADQAAVEIADLPNLTTAQWYAFIQKLRDDPSQSSELLSEAKKLNDSQAPK

SEQ ID NO: 112 - protein, 58 aa, ARTIFICIAL SEQUENCE
  Engineered IL-17A binding polypeptide
VDAKYAKEADQAAVEIADLPNLTWDQWHAFIIKLRDDPSQSSELLSEAKKLNDSQAPK

SEQ ID NO: 113 - protein, 58 aa, ARTIFICIAL SEQUENCE
  Engineered IL-17A binding polypeptide
VDAKYAKEADYAAFEIASLPNLTWDQWFAFIGKLRDDPSQSSELLSEAKKLNDSQAPK

SEQ ID NO: 114 - protein, 58 aa, ARTIFICIAL SEQUENCE
  Engineered IL-17A binding polypeptide
VDAKYAKEADDAAFEIAELPNLTWDQWHAFISKLRDDPSQSSELLSEAKKLNDSQAPK

SEQ ID NO: 115 - protein, 58 aa, ARTIFICIAL SEQUENCE
  Engineered IL-17A binding polypeptide
VDAKYAKEYDEAWFEIWALPNLTWDQAVAFIRKLNDDPSQSSELLSEAKKLNDSQAPK

SEQ ID NO: 116 - protein, 58 aa, ARTIFICIAL SEQUENCE
  Engineered IL-17A binding polypeptide
VDAKYAKEADEAWFEIWTLPNLTHAQQVAFIRKLIDDPSQSSELLSEAKKLNDSQAPK

SEQ ID NO: 117 - protein, 58 aa, ARTIFICIAL SEQUENCE
  Engineered IL-17A binding polypeptide
VDAKYAKEMDDAWWEIWSLPNLTYDQQYAFIVKLLDDPSQSSELLSEAKKLNDSQAPK

SEQ ID NO: 118 - protein, 58 aa, ARTIFICIAL SEQUENCE
  Engineered IL-17A binding polypeptide
VDAKYAKEHDNAWFEIWSLPNLTWDQARAFIVKLNDDPSQSSELLSEAKKLNDSQAPK

SEQ ID NO: 119 - protein, 58 aa, ARTIFICIAL SEQUENCE
  Engineered IL-17A binding polypeptide
VDAKYAKEADYAWFEIWMLPNLTYDQQKAFIVKLNDDPSQSSELLSEAKKLNDSQAPK

SEQ ID NO: 120 - protein, 58 aa, ARTIFICIAL SEQUENCE
  Engineered IL-17A binding polypeptide
VDAKYAKEWDDAQWEIWLLPNLTWDQQHAFIQKLIDDPSQSSELLSEAKKLNDSQAPK

SEQ ID NO: 121 - protein, 58 aa, ARTIFICIAL SEQUENCE
  Engineered IL-17A binding polypeptide
VDAKYAKEMADAQWEIWMLPNLTWAQGNAFISKLIDDPSQSSELLSEAKKLNDSQAPK

SEQ ID NO: 122 - protein, 58 aa, ARTIFICIAL SEQUENCE
  Engineered IL-17A binding polypeptide
VDAKYAKEMDDAQWEIWMLPNLTWHQSHAFIRKLLDDPSQSSELLSEAKKLNDSQAPK

SEQ ID NO: 123 - protein, 58 aa, ARTIFICIAL SEQUENCE
  Engineered IL-17A binding polypeptide
VDAKYAKEMAYAQWEIWLLPNLTYDQGHAFIVKLLDDPSQSSELLSEAKKLNDSQAPK

SEQ ID NO: 124 - protein, 58 aa, ARTIFICIAL SEQUENCE
  Engineered IL-17A binding polypeptide
VDAKYAKEMDEAWFEIWMLPNLTYVQQVAFIQKLIDDPSQSSELLSEAKKLNDSQAPK

SEQ ID NO: 125 - protein, 58 aa, ARTIFICIAL SEQUENCE
  Engineered IL-17A binding polypeptide
VDAKYAKEHDYAWFEIWALPNLTWDQQVAFIHKLNDDPSQSSELLSEAKKLNDSQAPK

SEQ ID NO: 126 - protein, 58 aa, ARTIFICIAL SEQUENCE
  Engineered IL-17A binding polypeptide
VDAKYAKEMDEAQWEIWLLPNLTWDQSNAFIRKLIDDPSQSSELLSEAKKLNDSQAPK

SEQ ID NO: 127 - protein, 58 aa, ARTIFICIAL SEQUENCE
  Engineered IL-17A binding polypeptide
VDAKYAKEWDEAQWEIWLLPNLTWHQQNAFIRKLIDDPSQSSELLSEAKKLNDSQAPK

SEQ ID NO: 128 - protein, 58 aa, ARTIFICIAL SEQUENCE
  Engineered IL-17A binding polypeptide
VDAKYAKEYDYAWFEIWELPNLTWDQQYAFIQKLNDDPSQSSELLSEAKKLNDSQAPK

SEQ ID NO: 129 - protein, 58 aa, ARTIFICIAL SEQUENCE
  Engineered IL-17A binding polypeptide
VDAKYAKEADEAWWEIWSLPNLTYAQAYAFIQKLLDDPSQSSELLSEAKKLNDSQAPK

SEQ ID NO: 130 - protein, 58 aa, ARTIFICIAL SEQUENCE
  Engineered IL-17A binding polypeptide
VDAKYAKEADFAWFEIWMLPNLTWDQQYAFISKLNDDPSQSSELLSEAKKLNDSQAPK

SEQ ID NO: 131 - protein, 58 aa, ARTIFICIAL SEQUENCE
  Engineered IL-17A binding polypeptide
VDAKYAKEMDEAQWEIWLLPNLTWHQQNAFIRKLLDDPSQSSELLSEAKKLNDSQAPK

SEQ ID NO: 132 - protein, 58 aa, ARTIFICIAL SEQUENCE
  Engineered IL-17A binding polypeptide
VDAKYAKEMDDAQWEIWLLPNLTWAQSNAFIRKLIDDPSQSSELLSEAKKLNDSQAPK

SEQ ID NO: 133 - protein, 58 aa, ARTIFICIAL SEQUENCE
  Engineered IL-17A binding polypeptide
VDAKYAKEMDEAQWEIWTLPNLTWAQSHAFISKLIDDPSQSSELLSEAKKLNDSQAPK

SEQ ID NO: 134 - protein, 58 aa, ARTIFICIAL SEQUENCE
  Engineered IL-17A binding polypeptide
VDAKYAKEADEAWFEIWALPNLTWDQAVAFIHKLNDDPSQSSELLSEAKKLNDSQAPK

SEQ ID NO: 135 - protein, 58 aa, ARTIFICIAL SEQUENCE
  Engineered IL-17A binding polypeptide
VDAKYAKEYDYAWFEIWLLPNLTWVQQTAFIHKLNDDPSQSSELLSEAKKLNDSQAPK

SEQ ID NO: 136 - protein, 58 aa, ARTIFICIAL SEQUENCE
  Engineered IL-17A binding polypeptide
VDAKYAKEADYAWFEIWLLPNLTWDQQYAFIRKLIDDPSQSSELLSEAKKLNDSQAPK

SEQ ID NO: 137 - protein, 58 aa, ARTIFICIAL SEQUENCE
  Engineered IL-17A binding polypeptide
VDAKYAKEADEAWWEIWSLPNLTHDQGVAFIRKLLDDPSQSSELLSEAKKLNDSQAPK

SEQ ID NO: 138 - protein, 58 aa, ARTIFICIAL SEQUENCE
  Engineered IL-17A binding polypeptide
VDAKYAKEMDEAQWEIWLLPNLTWAQSRAFIQKLIDDPSQSSELLSEAKKLNDSQAPK

SEQ ID NO: 139 - protein, 58 aa, ARTIFICIAL SEQUENCE
  Engineered IL-17A binding polypeptide
VDAKYAKEMDEAWWEIWLLPNLTHDQQFAFISKLIDDPSQSSELLSEAKKLNDSQAPK

SEQ ID NO: 140 - protein, 58 aa, ARTIFICIAL SEQUENCE
  Engineered IL-17A binding polypeptide
VDAKYAKEYDYAWFEIWTLPNLTWDQQKAFIHKLNDDPSQSSELLSEAKKLNDSQAPK

SEQ ID NO: 141 - protein, 58 aa, ARTIFICIAL SEQUENCE
  Engineered IL-17A binding polypeptide
VDAKYAKEMDYAQWEIWLLPNLTWDQQHAFISKLIDDPSQSSELLSEAKKLNDSQAPK

SEQ ID NO: 142 - protein, 58 aa, ARTIFICIAL SEQUENCE
  Engineered IL-17A binding polypeptide
VDAKYAKEHDDAWFEIWLLPNLTWDQAYAFIVKLNDDPSQSSELLSEAKKLNDSQAPK

SEQ ID NO: 143 - protein, 58 aa, ARTIFICIAL SEQUENCE
  Engineered IL-17A binding polypeptide
VDAKYAKEMGYAQLEIWLLPNLTWHQSNAFIRKLIDDPSQSSELLSEAKKLNDSQAPK

SEQ ID NO: 144 - protein, 58 aa, ARTIFICIAL SEQUENCE
  Engineered IL-17A binding polypeptide
VDAKYAKEMDEAQWEIWLLPNLTHDQQTAFIRKLIDDPSQSSELLSEAKKLNDSQAPK

SEQ ID NO: 145 - protein, 58 aa, ARTIFICIAL SEQUENCE
  Engineered IL-17A binding polypeptide
VDAKYAKEMDYAQWEIWLLPNLTWDQGNAFIRKLIDDPSQSSELLSEAKKLNDSQAPK

SEQ ID NO: 146 - protein, 58 aa, ARTIFICIAL SEQUENCE
  Engineered IL-17A binding polypeptide
VDAKYAKEMDFAQWEIWTLPNLTWDQSNAFIRKLIDDPSQSSELLSEAKKLNDSQAPK

SEQ ID NO: 147 - protein, 58 aa, ARTIFICIAL SEQUENCE
  Engineered IL-17A binding polypeptide
VDAKYAKEADYAWWEIWALPNLTHAQQVAFIQKLLDDPSQSSELLSEAKKLNDSQAPK

SEQ ID NO: 148 - protein, 58 aa, ARTIFICIAL SEQUENCE
  Engineered IL-17A binding polypeptide
VDAKYAKEMDYAQWEIWLLPNLTYDQGHAFIQKLLDDPSQSSELLSEAKKLNDSQAPK

SEQ ID NO: 149 - protein, 58 aa, ARTIFICIAL SEQUENCE
  Engineered IL-17A binding polypeptide
VDAKYAKEMDDAQWEIWLLPNLTWAQSHAFIVKLIDDPSQSSELLSEAKKLNDSQAPK

SEQ ID NO: 150 - protein, 58 aa, ARTIFICIAL SEQUENCE
  Engineered IL-17A binding polypeptide
VDAKYAKEYDQAWFEIWMLPNLTHRQQRAFIHKLNDDPSQSSELLSEAKKLNDSQAPK

SEQ ID NO: 151 - protein, 58 aa, ARTIFICIAL SEQUENCE
  Engineered IL-17A binding polypeptide
VDAKYAKEMDNAQWEIWMLPNLTWDQGRAFIVKLIDDPSQSSELLSEAKKLNDSQAPK

SEQ ID NO: 152 - protein, 58 aa, ARTIFICIAL SEQUENCE
  Engineered IL-17A binding polypeptide
VDAKYAKEHDEAWFEIWMLPNLTWHQARAFIVKLNDDPSQSSELLSEAKKLNDSQAPK

SEQ ID NO: 153 - protein, 58 aa, ARTIFICIAL SEQUENCE
  Engineered IL-17A binding polypeptide
VDAKYAKEMDDAQIEIWMLPNLTWAQGHAFIRKLIDDPSQSSELLSEAKKLNDSQAPK

SEQ ID NO: 154 - protein, 58 aa, ARTIFICIAL SEQUENCE
  Engineered IL-17A binding polypeptide
VDAKYAKEADYAQWEIWLLPNLTHAQGTAFIQKLIDDPSQSSELLSEAKKLNDSQAPK

SEQ ID NO: 155 - protein, 58 aa, ARTIFICIAL SEQUENCE
  Engineered IL-17A binding polypeptide
VDAKYAKEMDFAQWEIWLLPNLTWDQAHAFIQKLIDDPSQSSELLSEAKKLNDSQAPK

SEQ ID NO: 156 - protein, 58 aa, ARTIFICIAL SEQUENCE
  Engineered IL-17A binding polypeptide
VDAKYAKEYDEAWFEIWSLPNLTYDQQYAFIVKLIDDPSQSSELLSEAKKLNDSQAPK

SEQ ID NO: 157 - protein, 58 aa, ARTIFICIAL SEQUENCE
  Engineered IL-17A binding polypeptide
VDAKYAKEHDYAWFEIWALPNLTHDQQVAFIRKLNDDPSQSSELLSEAKKLNDSQAPK

SEQ ID NO: 158 - protein, 58 aa, ARTIFICIAL SEQUENCE
  Engineered IL-17A binding polypeptide
VDAKYAKEMDYAWFEIWMLPNLTHDQARAFIVKLNDDPSQSSELLSEAKKLNDSQAPK

SEQ ID NO: 159 - protein, 58 aa, ARTIFICIAL SEQUENCE
  Engineered IL-17A binding polypeptide
VDAKYAKEMDEAWWEIWTLPNLTYAQARAFIVKLIDDPSQSSELLSEAKKLNDSQAPK

SEQ ID NO: 160 - protein, 58 aa, ARTIFICIAL SEQUENCE
  Engineered IL-17A binding polypeptide
VDAKYAKEMDEAQWEIWLLPNLTWVQQNAFISKLIDDPSQSSELLSEAKKLNDSQAPK

SEQ ID NO: 161 - protein, 58 aa, ARTIFICIAL SEQUENCE
  Engineered IL-17A binding polypeptide
VDAKYAKEMDDAQWEIWMLPNLTWAQGNAFIRKLLDDPSQSSELLSEAKKLNDSQAPK

SEQ ID NO: 162 - protein, 58 aa, ARTIFICIAL SEQUENCE
  Engineered IL-17A binding polypeptide
VDAKYAKEMDEAQWEIWLLPNLTWHQQNAFIQKLIDDPSQSSELLSEAKKLNDSQAPK

SEQ ID NO: 163 - protein, 58 aa, ARTIFICIAL SEQUENCE
  Engineered IL-17A binding polypeptide
VDAKYAKEADNAQWEIWLLPNLTWAQGHAFIQKLIDDPSQSSELLSEAKKLNDSQAPK

SEQ ID NO: 164 - protein, 58 aa, ARTIFICIAL SEQUENCE
  Engineered IL-17A binding polypeptide
VDAKYAKEMDEAQWEIWLLPNLTWAQQNAFISKLIDDPSQSSELLSEAKKLNDSQAPK

SEQ ID NO: 165 - protein, 58 aa, ARTIFICIAL SEQUENCE
  Engineered IL-17A binding polypeptide
VDAKYAKEMDDAWFEIWLLPNLTWDQQYAFIQKLIDDPSQSSELLSEAKKLNDSQAPK

SEQ ID NO: 166 - protein, 58 aa, ARTIFICIAL SEQUENCE
  Engineered IL-17A binding polypeptide
VDAKYAKEMDFAQWEIWLLPNLTWHQQNAFIRKLIDDPSQSSELLSEAKKLNDSQAPK

SEQ ID NO: 167 - protein, 58 aa, ARTIFICIAL SEQUENCE
  Engineered IL-17A binding polypeptide
VDAKYAKEHAEAWFEIWALPNLTHAQQYAFIHKLNDDPSQSSELLSEAKKLNDSQAPK

SEQ ID NO: 168 - protein, 58 aa, ARTIFICIAL SEQUENCE
  Engineered IL-17A binding polypeptide
VDAKYAKEMDEAQWEIWMLPNLTWHQQHAFIRKLIDDPSQSSELLSEAKKLNDSQAPK

SEQ ID NO: 169 - protein, 58 aa, ARTIFICIAL SEQUENCE
  Engineered IL-17A binding polypeptide
VDAKYAKEMDYAQWEIWMLPNLTWDQQHAFIVKLLDDPSQSSELLSEAKKLNDSQAPK

SEQ ID NO: 170 - protein, 58 aa, ARTIFICIAL SEQUENCE
  Engineered IL-17A binding polypeptide
VDAKYAKEMDDAQWEIWMLPNLTWDQGNAFIRKLIDDPSQSSELLSEAKKLNDSQAPK

SEQ ID NO: 171 - protein, 58 aa, ARTIFICIAL SEQUENCE
  Engineered IL-17A binding polypeptide
VDAKYAKEHDQAWFEIWALPNLTHAQAVAFIVKLNDDPSQSSELLSEAKKLNDSQAPK

SEQ ID NO: 172 - protein, 58 aa, ARTIFICIAL SEQUENCE
  Engineered IL-17A binding polypeptide
VDAKYAKEADEAWWEIWLLPNLTHDQQYAFIVKLLDDPSQSSELLSEAKKLNDSQAPK

SEQ ID NO: 173 - protein, 58 aa, ARTIFICIAL SEQUENCE
  Engineered IL-17A binding polypeptide
VDAKYAKEMDYAWFEIWALPNLTYDQQYAFISKLLDDPSQSSELLSEAKKLNDSQAPK

SEQ ID NO: 174 - protein, 58 aa, ARTIFICIAL SEQUENCE
  Engineered IL-17A binding polypeptide
VDAKYAKEADFAWWEIWSLPNLTHHQAKAFIVKLIDDPSQSSELLSEAKKLNDSQAPK

SEQ ID NO: 175 - protein, 58 aa, ARTIFICIAL SEQUENCE
  Engineered IL-17A binding polypeptide
VDAKYAKEMDYAQWEIWMLPNLTWDQSHAFIQKLIDDPSQSSELLSEAKKLNDSQAPK

SEQ ID NO: 176 - protein, 58 aa, ARTIFICIAL SEQUENCE
  Engineered IL-17A binding polypeptide
VDAKYAKEMDDAQWEIWMLPNLTHDQGKAFIQKLIDDPSQSSELLSEAKKLNDSQAPK

SEQ ID NO: 177 - protein, 58 aa, ARTIFICIAL SEQUENCE
  Engineered IL-17A binding polypeptide
VDAKYAKEADEAWFEIWMLPNLTYAQQVAFIRKLNDDPSQSSELLSEAKKLNDSQAPK

SEQ ID NO: 178 - protein, 58 aa, ARTIFICIAL SEQUENCE
  Engineered IL-17A binding polypeptide
VDAKYAKEMDEAQWEIWLLPNLTYAQQSAFIQKLIDDPSQSSELLSEAKKLNDSQAPK

SEQ ID NO: 179 - protein, 58 aa, ARTIFICIAL SEQUENCE
  Engineered IL-17A binding polypeptide
VDAKYAKEMDFAQWEIWLLPNLTWDQQHAFIQKLIDDPSQSSELLSEAKKLNDSQAPK

SEQ ID NO: 180 - protein, 58 aa, ARTIFICIAL SEQUENCE
  Engineered IL-17A binding polypeptide
VDAKYAKEMDDAWWEIWALPNLTYDQQYAFIAKLIDDPSQSSELLSEAKKLNDSQAPK

SEQ ID NO: 181 - protein, 58 aa, ARTIFICIAL SEQUENCE
  Engineered IL-17A binding polypeptide
VDAKYAKEMDEAQWEIWMLPNLTWDQSHAFIQKLIDDPSQSSELLSEAKKLNDSQAPK

SEQ ID NO: 182 - protein, 58 aa, ARTIFICIAL SEQUENCE
  Engineered IL-17A binding polypeptide
VDAKYAKEHDYAWFEIWLLPNLTYDQQHAFIVKLNDDPSQSSELLSEAKKLNDSQAPK

SEQ ID NO: 183 - protein, 58 aa, ARTIFICIAL SEQUENCE
  Engineered IL-17A binding polypeptide
VDAKYAKEMDYAWWEIWLLPNLTHDQAKAFIQKLLDDPSQSSELLSEAKKLNDSQAPK

SEQ ID NO: 184 - protein, 58 aa, ARTIFICIAL SEQUENCE
  Engineered IL-17A binding polypeptide
VDAKYAKEADEAQWEIWTLPNLTWDQGHAFIRKLIDDPSQSSELLSEAKKLNDSQAPK

SEQ ID NO: 185 - protein, 58 aa, ARTIFICIAL SEQUENCE
  Engineered IL-17A binding polypeptide
VDAKYAKEMDYAQWEIWLLPNLTHAQQNAFIQKLIDDPSQSSELLSEAKKLNDSQAPK

SEQ ID NO: 186 - protein, 58 aa, ARTIFICIAL SEQUENCE
  Engineered IL-17A binding polypeptide
VDAKYAKEADYAWWEIWLLPNLTHAQQTAFIHKLLDDPSQSSELLSEAKKLNDSQAPK

SEQ ID NO: 187 - protein, 58 aa, ARTIFICIAL SEQUENCE
  Engineered IL-17A binding polypeptide
VDAKYAKEMDYAQWEIWMLPNLTHAQSRAFIQKLIDDPSQSSELLSEAKKLNDSQAPK

SEQ ID NO: 188 - protein, 58 aa, ARTIFICIAL SEQUENCE
  Engineered IL-17A binding polypeptide
VDAKYAKEYDYAWFEIWALPNLTHHQQVAFIRKLNDDPSQSSELLSEAKKLNDSQAPK

SEQ ID NO: 189 - protein, 58 aa, ARTIFICIAL SEQUENCE
  Engineered IL-17A binding polypeptide
VDAKYAKEMDDAWWEIWLLPNLTHDQQRAFIQKLLDDPSQSSELLSEAKKLNDSQAPK

SEQ ID NO: 190 - protein, 58 aa, ARTIFICIAL SEQUENCE
  Engineered IL-17A binding polypeptide
VDAKYAKEMDNAWWEIWTLPNLTHAQARAFIVKLLDDPSQSSELLSEAKKLNDSQAPK

SEQ ID NO: 191 - protein, 58 aa, ARTIFICIAL SEQUENCE
  Engineered IL-17A binding polypeptide
VDAKYAKEMDFAQWEIWLLPNLTHHQQNAFIRKLIDDPSQSSELLSEAKKLNDSQAPK

SEQ ID NO: 192 - protein, 58 aa, ARTIFICIAL SEQUENCE
  Engineered IL-17A binding polypeptide
VDAKYAKEADQAWWEIWALPNLTHDQAVAFIRKLIDDPSQSSELLSEAKKLNDSQAPK

SEQ ID NO: 193 - protein, 58 aa, ARTIFICIAL SEQUENCE
  Engineered IL-17A binding polypeptide
VDAKYAKEYDYAWFEIWALPNLTRAQATAFISKLNDDPSQSSELLSEAKKLNDSQAPK

SEQ ID NO: 194 - protein, 58 aa, ARTIFICIAL SEQUENCE
  Engineered IL-17A binding polypeptide
VDAKYAKEADYAWFEIWSLPNLTYAQQVAFIRKLNDDPSQSSELLSEAKKLNDSQAPK

SEQ ID NO: 195 - protein, 58 aa, ARTIFICIAL SEQUENCE
  Engineered IL-17A binding polypeptide
VDAKYAKEAGYAWFEIWSLPNLTHRQQVAFIRKLNDDPSQSSELLSEAKKLNDSQAPK

SEQ ID NO: 196 - protein, 58 aa, ARTIFICIAL SEQUENCE
  Engineered IL-17A binding polypeptide
VDAKYAKEHGDAWFEIWLLPNLTWDQQRAFIVKLNDDPSQSSELLSEAKKLNDSQAPK

SEQ ID NO: 197 - protein, 58 aa, ARTIFICIAL SEQUENCE
  Engineered IL-17A binding polypeptide
VDAKYAKEADEAWFEIWALPNLTHDQGKAFIRKLLDDPSQSSELLSEAKKLNDSQAPK

SEQ ID NO: 198 - protein, 58 aa, ARTIFICIAL SEQUENCE
  Engineered IL-17A binding polypeptide
VDAKYAKEADYAWWEIWLLPNLTHDQARAFISKLNDDPSQSSELLSEAKKLNDSQAPK

SEQ ID NO: 199 - protein, 58 aa, ARTIFICIAL SEQUENCE
  Engineered IL-17A binding polypeptide
VDAKYAKEADEAWWEIWALPNLTHAQQVAFIRKLIDDPSQSSELLSEAKKLNDSQAPK

SEQ ID NO: 200 - protein, 58 aa, ARTIFICIAL SEQUENCE
  Engineered IL-17A binding polypeptide
VDAKYAKEADYAWFEIWSLPNLTWDQSRAFIGKLNDDPSQSSELLSEAKKLNDSQAPK

SEQ ID NO: 201 - protein, 58 aa, ARTIFICIAL SEQUENCE
  Engineered IL-17A binding polypeptide
VDAKYAKEMDFAWFEIWALPNLTHVQQVAFIRKLIDDPSQSSELLSEAKKLNDSQAPK

SEQ ID NO: 202 - protein, 58 aa, ARTIFICIAL SEQUENCE
  Engineered IL-17A binding polypeptide
VDAKYAKEADEAWFEIWALPNLTYDQSKAFIRKLIDDPSQSSELLSEAKKLNDSQAPK

SEQ ID NO: 203 - protein, 58 aa, ARTIFICIAL SEQUENCE
  Engineered IL-17A binding polypeptide
VDAKYAKEADYAWFEIWALPNLTHAQQYAFIQKLNDDPSQSSELLSEAKKLNDSQAPK

SEQ ID NO: 204 - protein, 58 aa, ARTIFICIAL SEQUENCE
  Engineered IL-17A binding polypeptide
VDAKYAKEYLYAWMEIWTLPNLTWDQARAFIVKLLDDPSQSSELLSEAKKLNDSQAPK

SEQ ID NO: 205 - protein, 58 aa, ARTIFICIAL SEQUENCE
  Engineered IL-17A binding polypeptide
VDAKYAKEYDFAWFEIWALPNLTHDQGKAFISKLNDDPSQSSELLSEAKKLNDSQAPK

SEQ ID NO: 206 - protein, 58 aa, ARTIFICIAL SEQUENCE
  Engineered IL-17A binding polypeptide
VDAKYAKEADYAWWEIWSLPNLTHAQAYAFIRKLIDDPSQSSELLSEAKKLNDSQAPK

SEQ ID NO: 207 - protein, 58 aa, ARTIFICIAL SEQUENCE
  Engineered IL-17A binding polypeptide
VDAKYAKEADYAWWEIWALPNLTHAQAVAFIQKLLDDPSQSSELLSEAKKLNDSQAPK

SEQ ID NO: 208 - protein, 58 aa, ARTIFICIAL SEQUENCE
  Engineered IL-17A binding polypeptide
VDAKYAKEMDYAWWEIWLLPNLTHDQQVAFIRKLIDDPSQSSELLSEAKKLNDSQAPK

SEQ ID NO: 209 - protein, 58 aa, ARTIFICIAL SEQUENCE
  Engineered IL-17A binding polypeptide
VDAKYAKEWDYAWWEIWALPNLTHDQARAFIIKLNDDPSQSSELLSEAKKLNDSQAPK

SEQ ID NO: 210 - protein, 58 aa, ARTIFICIAL SEQUENCE
  Engineered IL-17A binding polypeptide
VDAKYAKEMDFAWWEIWSLPNLTHAQARAFIVKLIDDPSQSSELLSEAKKLNDSQAPK

SEQ ID NO: 211 - protein, 58 aa, ARTIFICIAL SEQUENCE
  Engineered IL-17A binding polypeptide
VDAKYAKEADYAWWEIWALPNLTHAQQVAFISKLLDDPSQSSELLSEAKKLNDSQAPK

SEQ ID NO: 212 - protein, 58 aa, ARTIFICIAL SEQUENCE
  Engineered IL-17A binding polypeptide
VDAKYAKEADYAWWEIWSLPNLTHAQAKAFIQKLIDDPSQSSELLSEAKKLNDSQAPK

SEQ ID NO: 213 - protein, 58 aa, ARTIFICIAL SEQUENCE
  Engineered IL-17A binding polypeptide
VDAKYAKEHDYAWFEIWMLPNLTHAQQVAFIHKLNDDPSQSSELLSEAKKLNDSQAPK

SEQ ID NO: 214 - protein, 58 aa, ARTIFICIAL SEQUENCE
  Engineered IL-17A binding polypeptide
VDAKYAKEMDYAWFEIWDLPNLTYDQAVAFIHKLNDDPSQSSELLSEAKKLNDSQAPK

SEQ ID NO: 215 - protein, 58 aa, ARTIFICIAL SEQUENCE
  Engineered IL-17A binding polypeptide
VDAKYAKEYDYAWFEIWALPNLTHAQQVAFIQKLIDDPSQSSELLSEAKKLNDSQAPK

SEQ ID NO: 216 - protein, 58 aa, ARTIFICIAL SEQUENCE
  Engineered IL-17A binding polypeptide
VDAKYAKEYDYAWFEIWLLPNLTYDQQRAFIVKLNDDPSQSSELLSEAKKLNDSQAPK

SEQ ID NO: 217 - protein, 58 aa, ARTIFICIAL SEQUENCE
  Engineered IL-17A binding polypeptide
VDAKYAKEHDYAWFEIWSLPNLTWDQQVAFIRKLNDDPSQSSELLSEAKKLNDSQAPK

SEQ ID NO: 218 - protein, 58 aa, ARTIFICIAL SEQUENCE
  Engineered IL-17A binding polypeptide
VDAKYAKEYDEAWWEIWLLPNLTHDQAYAFIHKLNDDPSQSSELLSEAKKLNDSQAPK

SEQ ID NO: 219 - protein, 58 aa, ARTIFICIAL SEQUENCE
  Engineered IL-17A binding polypeptide
VDAKYAKEMDYAQFEIWLLPNLTWAQSNAFIRKLIDDPSQSSELLSEAKKLNDSQAPK

SEQ ID NO: 220 - protein, 58 aa, ARTIFICIAL SEQUENCE
  Engineered IL-17A binding polypeptide
VDAKYAKEADYAWFEIWDLPNLTYDQQYAFIRKLLDDPSQSSELLSEAKKLNDSQAPK

SEQ ID NO: 221 - protein, 58 aa, ARTIFICIAL SEQUENCE
  Engineered IL-17A binding polypeptide
VDAKYAKEMDYAWFEIWALPNLTHDQAVAFIQKLLDDPSQSSELLSEAKKLNDSQAPK

SEQ ID NO: 222 - protein, 58 aa, ARTIFICIAL SEQUENCE
  Engineered IL-17A binding polypeptide
VDAKYAKEADYAWFEIWALPNLTHAQQTAFIRKLNDDPSQSSELLSEAKKLNDSQAPK

SEQ ID NO: 223 - protein, 58 aa, ARTIFICIAL SEQUENCE
  Engineered IL-17A binding polypeptide
VDAKYAKEADYAQWEIWLLPNLTWDQGHAFIQKLIDDPSQSSELLSEAKKLNDSQAPK

SEQ ID NO: 224 - protein, 58 aa, ARTIFICIAL SEQUENCE
  Engineered IL-17A binding polypeptide
VDAKYAKEMDYAWFEIWLLPNLTYDQQHAFIRKLLDDPSQSSELLSEAKKLNDSQAPK

SEQ ID NO: 225 - protein, 58 aa, ARTIFICIAL SEQUENCE
  Engineered IL-17A binding polypeptide
VDAKYAKEMDEAQWEIWLLPNLTWVQGNAFIRKLLDDPSQSSELLSEAKKLNDSQAPK

SEQ ID NO: 226 - protein, 58 aa, ARTIFICIAL SEQUENCE
  Engineered IL-17A binding polypeptide
VDAKYAKEYDNAWFEIWLLPNLTHDQQRAFIVKLNDDPSQSSELLSEAKKLNDSQAPK

SEQ ID NO: 227 - protein, 58 aa, ARTIFICIAL SEQUENCE
  Engineered IL-17A binding polypeptide
VDAKYAKEMDEAQWEIWMLPNLTYDQGHAFIRKLIDDPSQSSELLSEAKKLNDSQAPK

SEQ ID NO: 228 - protein, 58 aa, ARTIFICIAL SEQUENCE
  Engineered IL-17A binding polypeptide
VDAKYAKEMDFAQLEIWTLPNLTWAQGHAFIQKLIDDPSQSSELLSEAKKLNDSQAPK

SEQ ID NO: 229 - protein, 58 aa, ARTIFICIAL SEQUENCE
  Engineered IL-17A binding polypeptide
VDAKYAKEHDYAWFEIWLLPNLTWDQQTAFIHKLNDDPSQSSELLSEAKKLNDSQAPK

SEQ ID NO: 230 - protein, 58 aa, ARTIFICIAL SEQUENCE
  Engineered IL-17A binding polypeptide
VDAKYAKEMDQAQWEIWLLPNLTWHQSHAFISKLIDDPSQSSELLSEAKKLNDSQAPK

SEQ ID NO: 231 - protein, 58 aa, ARTIFICIAL SEQUENCE
  Engineered IL-17A binding polypeptide
VDAKYAKEADYAWFEIWALPNLTHDQARAFIRKLIDDPSQSSELLSEAKKLNDSQAPK

SEQ ID NO: 232 - protein, 58 aa, ARTIFICIAL SEQUENCE
  Engineered IL-17A binding polypeptide
VDAKYAKEMDDAQWEIWLLPNLTWDQQHAFIVKLIDDPSQSSELLSEAKKLNDSQAPK

SEQ ID NO: 233 - protein, 58 aa, ARTIFICIAL SEQUENCE
  Engineered IL-17A binding polypeptide
VDAKYAKEYDDAWFEIWLLPNLTWDQQYAFIHKLNDDPSQSSELLSEAKKLNDSQAPK

SEQ ID NO: 234 - protein, 58 aa, ARTIFICIAL SEQUENCE
  Engineered IL-17A binding polypeptide
VDAKYAKEMDEAWWEIWLLPNLTYAQQYAFIQKLLDDPSQSSELLSEAKKLNDSQAPK

SEQ ID NO: 235 - protein, 58 aa, ARTIFICIAL SEQUENCE
  Engineered IL-17A binding polypeptide
VDAKYAKEADYAWFEIWSLPNLTHAQAYAFIVKLIDDPSQSSELLSEAKKLNDSQAPK

SEQ ID NO: 236 - protein, 58 aa, ARTIFICIAL SEQUENCE
  Engineered IL-17A binding polypeptide
VDAKYAKEMDDAQWEIWMLPNLTWDQSHAFIAKLIDDPSQSSELLSEAKKLNDSQAPK

SEQ ID NO: 237 - protein, 58 aa, ARTIFICIAL SEQUENCE
  Engineered IL-17A binding polypeptide
VDAKYAKEMDYAQWEIWMLPNLTWDQSNAFIRKLIDDPSQSSELLSEAKKLNDSQAPK

SEQ ID NO: 238 - protein, 58 aa, ARTIFICIAL SEQUENCE
  Engineered IL-17A binding polypeptide
VDAKYAKEADYAWWEIWALPNLTHDQARAFIVKLLDDPSQSSELLSEAKKLNDSQAPK

SEQ ID NO: 239 - protein, 58 aa, ARTIFICIAL SEQUENCE
  Engineered IL-17A binding polypeptide
VDAKYAKEADYAWWEIWLLPNLTWDQQRAFIIKLNDDPSQSSELLSEAKKLNDSQAPK

SEQ ID NO: 240 - protein, 58 aa, ARTIFICIAL SEQUENCE
  Engineered IL-17A binding polypeptide
VDAKYAKEADEAQWEIWLLPNLTYDQGTAFIRKLIDDPSQSSELLSEAKKLNDSQAPK

SEQ ID NO: 241 - protein, 58 aa, ARTIFICIAL SEQUENCE
  Engineered IL-17A binding polypeptide
VDAKYAKEMDEAQWEIWLLPNLTWDQQHAFIQKLLDDPSQSSELLSEAKKLNDSQAPK

SEQ ID NO: 242 - protein, 58 aa, ARTIFICIAL SEQUENCE
  Engineered IL-17A binding polypeptide
VDAKYAKEYDEAWFEIWTLPNLTHDQARAFIIKLNDDPSQSSELLSEAKKLNDSQAPK

SEQ ID NO: 243 - protein, 58 aa, ARTIFICIAL SEQUENCE
  Engineered IL-17A binding polypeptide
VDAKYAKEMDRAQWEIWLLPNLTWHQQNAFIRKLIDDPSQSSELLSEAKKLNDSQAPK

SEQ ID NO: 244 - protein, 58 aa, ARTIFICIAL SEQUENCE
  Engineered IL-17A binding polypeptide
VDAKYAKEHDFAWWEIWLLPNLTWDQQRAFIVKLNDDPSQSSELLSEAKKLNDSQAPK

SEQ ID NO: 245 - protein, 58 aa, ARTIFICIAL SEQUENCE
  Engineered IL-17A binding polypeptide
VDAKYAKEMDQAQWEIWMLPNLTWDQGHAFIRKLLDDPSQSSELLSEAKKLNDSQAPK

SEQ ID NO: 246 - protein, 58 aa, ARTIFICIAL SEQUENCE
  Engineered IL-17A binding polypeptide
VDAKYAKEADYAWFEIWMLPNLTWDQQRAFIGKLIDDPSQSSELLSEAKKLNDSQAPK

SEQ ID NO: 247 - protein, 58 aa, ARTIFICIAL SEQUENCE
  Engineered IL-17A binding polypeptide
VDAKYAKEADYAWFEIWMLPNLTYDQQRAFIVKLLDDPSQSSELLSEAKKLNDSQAPK

SEQ ID NO: 248 - protein, 58 aa, ARTIFICIAL SEQUENCE
  Engineered IL-17A binding polypeptide
VDAKYAKEMDRAQWEIWLLPNLTWAQSNAFIRKLIDDPSQSSELLSEAKKLNDSQAPK

SEQ ID NO: 249 - protein, 58 aa, ARTIFICIAL SEQUENCE
  Engineered IL-17A binding polypeptide
VDAKYAKEADYAWFEIWMLPNLTWDQQVAFIRKLNDDPSQSSELLSEAKKLNDSQAPK

SEQ ID NO: 250 - protein, 58 aa, ARTIFICIAL SEQUENCE
  Engineered IL-17A binding polypeptide
VDAKYAKEMDNAQWEIWLLPNLTWDQQNAFIRKLIDDPSQSSELLSEAKKLNDSQAPK

SEQ ID NO: 251 - protein, 58 aa, ARTIFICIAL SEQUENCE
  Engineered IL-17A binding polypeptide
VDAKYAKEADEAWWEIWALPNLTYAQGRAFIVKLIDDPSQSSELLSEAKKLNDSQAPK

SEQ ID NO: 252 - protein, 58 aa, ARTIFICIAL SEQUENCE
  Engineered IL-17A binding polypeptide
VDAKYAKEADFAWFEIWLLPNLTWDQQTAFIQKLNDDPSQSSELLSEAKKLNDSQAPK

SEQ ID NO: 253 - protein, 58 aa, ARTIFICIAL SEQUENCE
  Engineered IL-17A binding polypeptide
VDAKYAKEMDDAQWEIWLLPNLTWDQQHAFIQKLLDDPSQSSELLSEAKKLNDSQAPK

SEQ ID NO: 254 - protein, 58 aa, ARTIFICIAL SEQUENCE
  Engineered IL-17A binding polypeptide
VDAKYAKEMNEAQWEIWLLPNLTWDQGHAFIAKLIDDPSQSSELLSEAKKLNDSQAPK

SEQ ID NO: 255 - protein, 58 aa, ARTIFICIAL SEQUENCE
  Engineered IL-17A binding polypeptide
VDAKYAKEMDDAQWEIWMLPNLTWDQQHAFIRKLIDDPSQSSELLSEAKKLNDSQAPK

SEQ ID NO: 256 - protein, 58 aa, ARTIFICIAL SEQUENCE
  Engineered IL-17A binding polypeptide
VDAKYAKEMDYAQWEIWTLPNLTWHQGHAFIQKLLDDPSQSSELLSEAKKLNDSQAPK

SEQ ID NO: 257 - protein, 58 aa, ARTIFICIAL SEQUENCE
  Engineered IL-17A binding polypeptide
VDAKYAKEYDYAWFEIWLLPNLTYAQQRAFIAKLNDDPSQSSELLSEAKKLNDSQAPK

SEQ ID NO: 258 - protein, 58 aa, ARTIFICIAL SEQUENCE
  Engineered IL-17A binding polypeptide
VDAKYAKEMDQAWFEIWLLPNLTYDQQYAFIQKLIDDPSQSSELLSEAKKLNDSQAPK

SEQ ID NO: 259 - protein, 58 aa, ARTIFICIAL SEQUENCE
  Engineered IL-17A binding polypeptide
VDAKYAKEMDNAQWEIWMLPNLTWDQSHAFIVKLLDDPSQSSELLSEAKKLNDSQAPK

SEQ ID NO: 260 - protein, 58 aa, ARTIFICIAL SEQUENCE
  Engineered IL-17A binding polypeptide
VDAKYAKEMDYAWFEIWSLPNLTHAQAVAFIRKLNDDPSQSSELLSEAKKLNDSQAPK

SEQ ID NO: 261 - protein, 58 aa, ARTIFICIAL SEQUENCE
  Engineered IL-17A binding polypeptide
VDAKYAKEADYAWFEIWALPNLTYAQAVAFIRKLNDDPSQSSELLSEAKKLNDSQAPK

SEQ ID NO: 262 - protein, 58 aa, ARTIFICIAL SEQUENCE
  Engineered IL-17A binding polypeptide
VDAKYAKEMDDAQWEIWLLPNLTWHQQNAFIAKLIDDPSQSSELLSEAKKLNDSQAPK

SEQ ID NO: 263 - protein, 58 aa, ARTIFICIAL SEQUENCE
  Engineered IL-17A binding polypeptide
VDAKYAKEHDYAWFEIWMLPNLTWDQQTAFIHKLNDDPSQSSELLSEAKKLNDSQAPK

SEQ ID NO: 264 - protein, 58 aa, ARTIFICIAL SEQUENCE
  Engineered IL-17A binding polypeptide
VDAKYAKEAADAWFEIWLLPNLTHAQQVAFIRKLNDDPSQSSELLSEAKKLNDSQAPK

SEQ ID NO: 265 - protein, 58 aa, ARTIFICIAL SEQUENCE
  Engineered IL-17A binding polypeptide
VDAKYAKEYDYAWFEIWMLPNLTHAQAFAFIQKLNDDPSQSSELLSEAKKLNDSQAPK

SEQ ID NO: 266 - protein, 58 aa, ARTIFICIAL SEQUENCE
  Engineered IL-17A binding polypeptide
VDAKYAKEYDEAWFEIWALPNLTWDQQRAFIVKLNDDPSQSSELLSEAKKLNDSQAPK

SEQ ID NO: 267 - protein, 58 aa, ARTIFICIAL SEQUENCE
  Engineered IL-17A binding polypeptide
VDAKYAKEMDDAWFEIWMLPNLTHDQAYAFIQKLIDDPSQSSELLSEAKKLNDSQAPK

SEQ ID NO: 268 - protein, 58 aa, ARTIFICIAL SEQUENCE
  Engineered IL-17A binding polypeptide
VDAKYAKEMGEAQLEIWMLPNLTWDQGNAFIRKLIDDPSQSSELLSEAKKLNDSQAPK

SEQ ID NO: 269 - protein, 58 aa, ARTIFICIAL SEQUENCE
  Engineered IL-17A binding polypeptide
VDAKYAKEMDDAQWEIWLLPNLTYDQGTAFIRKLIDDPSQSSELLSEAKKLNDSQAPK

SEQ ID NO: 270 - protein, 58 aa, ARTIFICIAL SEQUENCE
  Engineered IL-17A binding polypeptide
VDAKYAKEAGEAWFEIWLLPNLTYDQAYAFIRKLNDDPSQSSELLSEAKKLNDSQAPK

SEQ ID NO: 271 - protein, 58 aa, ARTIFICIAL SEQUENCE
  Engineered IL-17A binding polypeptide
VDAKYAKEYDDAWFEIWLLPNLTHAQAKAFIHKLNDDPSQSSELLSEAKKLNDSQAPK

SEQ ID NO: 272 - protein, 58 aa, ARTIFICIAL SEQUENCE
  Engineered IL-17A binding polypeptide
VDAKYAKEADYAWFEIWMLPNLTHDQAYAFIQKLNDDPSQSSELLSEAKKLNDSQAPK

SEQ ID NO: 273 - protein, 58 aa, ARTIFICIAL SEQUENCE
  Engineered IL-17A binding polypeptide
VDAKYAKEMDYAWFEIWLLPNLTYDQQYAFIQKLIDDPSQSSELLSEAKKLNDSQAPK

SEQ ID NO: 274 - protein, 58 aa, ARTIFICIAL SEQUENCE
  Engineered IL-17A binding polypeptide
VDAKYAKEYDYAWFEIWTLPNLTHDQQYAFIRKLNDDPSQSSELLSEAKKLNDSQAPK

SEQ ID NO: 275 - protein, 58 aa, ARTIFICIAL SEQUENCE
  Engineered IL-17A binding polypeptide
VDAKYAKEYDYAWFEIWLLPNLTHAQASAFIVKLNDDPSQSSELLSEAKKLNDSQAPK

SEQ ID NO: 276 - protein, 58 aa, ARTIFICIAL SEQUENCE
  Engineered IL-17A binding polypeptide
VDAKYAKEMGDAQWEIWLLPNLTWHQQNAFIAKLIDDPSQSSELLSEAKKLNDSQAPK

SEQ ID NO: 277 - protein, 58 aa, ARTIFICIAL SEQUENCE
  Engineered IL-17A binding polypeptide
VDAKYAKEADFAWFEIWTLPNLTHDQQRAFIVKLLDDPSQSSELLSEAKKLNDSQAPK

SEQ ID NO: 278 - protein, 58 aa, ARTIFICIAL SEQUENCE
  Engineered IL-17A binding polypeptide
VDAKYAKEHDYAWFEIWALPNLTWDQAVAFIHKLNDDPSQSSELLSEAKKLNDSQAPK

SEQ ID NO: 279 - protein, 58 aa, ARTIFICIAL SEQUENCE
  Engineered IL-17A binding polypeptide
VDAKYAKEHDNAWFEIWLLPNLTYDQQVAFIHKLNDDPSQSSELLSEAKKLNDSQAPK

SEQ ID NO: 280 - protein, 58 aa, ARTIFICIAL SEQUENCE
  Engineered IL-17A binding polypeptide
VDAKYAKEMDEAQWEIWLLPNLTHDQSRAFIQKLIDDPSQSSELLSEAKKLNDSQAPK

SEQ ID NO: 281 - protein, 58 aa, ARTIFICIAL SEQUENCE
  Engineered IL-17A binding polypeptide
VDAKYAKEADEAWFEIWALPNLTHAQAVAFIRKLNDDPSQSSELLSEAKKLNDSQAPK

SEQ ID NO: 282 - protein, 58 aa, ARTIFICIAL SEQUENCE
  Engineered IL-17A binding polypeptide
VDAKYAKEMDYAQWEIWSLPNLTWDQGNAFIRKLIDDPSQSSELLSEAKKLNDSQAPK

SEQ ID NO: 283 - protein, 58 aa, ARTIFICIAL SEQUENCE
  Engineered IL-17A binding polypeptide
VDAKYAKEAAEAQLEIWLLPNLTWDQGHAFIIKLIDDPSQSSELLSEAKKLNDSQAPK

SEQ ID NO: 284 - protein, 58 aa, ARTIFICIAL SEQUENCE
  Engineered IL-17A binding polypeptide
VDAKYAKEMAYAQWEIWLLPNLTWHQSNAFIRKLIDDPSQSSELLSEAKKLNDSQAPK

SEQ ID NO: 285 - protein, 58 aa, ARTIFICIAL SEQUENCE
  Engineered IL-17A binding polypeptide
VDAKYAKEMDNAQWEIWMLPNLTWHQQHAFIQKLIDDPSQSSELLSEAKKLNDSQAPK

SEQ ID NO: 286 - protein, 58 aa, ARTIFICIAL SEQUENCE
  Engineered IL-17A binding polypeptide
VDAKYAKEYDQAWFEIWLLPNLTWDQAYAFIQKLNDDPSQSSELLSEAKKLNDSQAPK

SEQ ID NO: 287 - protein, 58 aa, ARTIFICIAL SEQUENCE
  Engineered IL-17A binding polypeptide
VDAKYAKEWDYAWFEIWELPNLTWDQARAFIIKLNDDPSQSSELLSEAKKLNDSQAPK

SEQ ID NO: 288 - protein, 58 aa, ARTIFICIAL SEQUENCE
  Engineered IL-17A binding polypeptide
VDAKYAKEADYAWFEIWSLPNLTWDQQRAFIHKLNDDPSQSSELLSEAKKLNDSQAPK

SEQ ID NO: 289 - protein, 58 aa, ARTIFICIAL SEQUENCE
  Engineered IL-17A binding polypeptide
VDAKYAKEADFAQWEIWLLPNLTWDQGHAFIQKLIDDPSQSSELLSEAKKLNDSQAPK

SEQ ID NO: 290 - protein, 58 aa, ARTIFICIAL SEQUENCE
  Engineered IL-17A binding polypeptide
VDAKYAKEYDEAWFEIWLLPNLTYDQQRAFIIKLNDDPSQSSELLSEAKKLNDSQAPK

SEQ ID NO: 291 - protein, 58 aa, ARTIFICIAL SEQUENCE
  Engineered IL-17A binding polypeptide
VDAKYAKEMDDAQWEIWMLPNLTWDQGHAFIRKLLDDPSQSSELLSEAKKLNDSQAPK

SEQ ID NO: 292 - protein, 58 aa, ARTIFICIAL SEQUENCE
  Engineered IL-17A binding polypeptide
VDAKYAKEMDEAWWEIWTLPNLTYDQQYAFIAKLLDDPSQSSELLSEAKKLNDSQAPK

SEQ ID NO: 293 - protein, 58 aa, ARTIFICIAL SEQUENCE
  Engineered IL-17A binding polypeptide
VDAKYAKEADDAQWEIWLLPNLTWDQSHAFIQKLIDDPSQSSELLSEAKKLNDSQAPK

SEQ ID NO: 294 - protein, 58 aa, ARTIFICIAL SEQUENCE
  Engineered IL-17A binding polypeptide
VDAKYAKEMDDAWFEIWLLPNLTYDQQYAFIQKLIDDPSQSSELLSEAKKLNDSQAPK

SEQ ID NO: 295 - protein, 58 aa, ARTIFICIAL SEQUENCE
  Engineered IL-17A binding polypeptide
VDAKYAKEMDEAQWEIWMLPNLTWAQSHAFIQKLIDDPSQSSELLSEAKKLNDSQAPK

SEQ ID NO: 296 - protein, 58 aa, ARTIFICIAL SEQUENCE
  Engineered IL-17A binding polypeptide
VDAKYAKEYDFAWFEIWLLPNLTWAQQRAFISKLNDDPSQSSELLSEAKKLNDSQAPK

SEQ ID NO: 297 - protein, 58 aa, ARTIFICIAL SEQUENCE
  Engineered IL-17A binding polypeptide
VDAKYAKEHANAWFEIWLLPNLTYDQQVAFIRKLNDDPSQSSELLSEAKKLNDSQAPK

SEQ ID NO: 298 - protein, 58 aa, ARTIFICIAL SEQUENCE
  Engineered IL-17A binding polypeptide
VDAKYAKEYDNAWFEIWLLPNLTYDQATAFIHKLNDDPSQSSELLSEAKKLNDSQAPK

SEQ ID NO: 299 - protein, 58 aa, ARTIFICIAL SEQUENCE
  Engineered IL-17A binding polypeptide
VDAKYAKEWDEAWFEIWALPNLTHAQARAFIQKLIDDPSQSSELLSEAKKLNDSQAPK

SEQ ID NO: 300 - protein, 58 aa, ARTIFICIAL SEQUENCE
  Engineered IL-17A binding polypeptide
VDAKYAKEYDFAWFEIWLLPNLTYDQAVAFIRKLNDDPSQSSELLSEAKKLNDSQAPK

SEQ ID NO: 301 - protein, 58 aa, ARTIFICIAL SEQUENCE
  Engineered IL-17A binding polypeptide
VDAKYAKEADYAWFEIWALPNLTHAQQRAFIIKLNDDPSQSSELLSEAKKLNDSQAPK

SEQ ID NO: 302 - protein, 58 aa, ARTIFICIAL SEQUENCE
  Engineered IL-17A binding polypeptide
VDAKYAKEADYAWWEIWLLPNLTYDQQRAFIVKLNDDPSQSSELLSEAKKLNDSQAPK

SEQ ID NO: 303 - protein, 58 aa, ARTIFICIAL SEQUENCE
  Engineered IL-17A binding polypeptide
VDAKYAKEHDYAWFEIWLLPNLTWDQQKAFIAKLNDDPSQSSELLSEAKKLNDSQAPK

SEQ ID NO: 304 - protein, 58 aa, ARTIFICIAL SEQUENCE
  Engineered IL-17A binding polypeptide
VDAKYAKEADYAWFEIWMLPNLTYDQAVAFIIKLNDDPSQSSELLSEAKKLNDSQAPK

SEQ ID NO: 305 - protein, 58 aa, ARTIFICIAL SEQUENCE
  Engineered IL-17A binding polypeptide
VDAKYAKEMDFAQWEIWTLPNLTWDQSHAFISKLIDDPSQSSELLSEAKKLNDSQAPK

SEQ ID NO: 306 - protein, 58 aa, ARTIFICIAL SEQUENCE
  Engineered IL-17A binding polypeptide
VDAKYAKEMGEAQIEIWLLPNLTYDQGHAFIQKLIDDPSQSSELLSEAKKLNDSQAPK

SEQ ID NO: 307 - protein, 58 aa, ARTIFICIAL SEQUENCE
  Engineered IL-17A binding polypeptide
VDAKYAKEADYAWFEIWALPNLTYDQARAFIQKLLDDPSQSSELLSEAKKLNDSQAPK

SEQ ID NO: 308 - protein, 58 aa, ARTIFICIAL SEQUENCE
  Engineered IL-17A binding polypeptide
VDAKYAKEADYAWWEIWSLPNLTHAQARAFIVKLIDDPSQSSELLSEAKKLNDSQAPK

SEQ ID NO: 309 - protein, 58 aa, ARTIFICIAL SEQUENCE
  Engineered IL-17A binding polypeptide
VDAKYAKEYDQAWFEIWLLPNLTHDQAKAFIIKLNDDPSQSSELLSEAKKLNDSQAPK

SEQ ID NO: 310 - protein, 58 aa, ARTIFICIAL SEQUENCE
  Engineered IL-17A binding polypeptide
VDAKYAKEADEAWWEIWTLPNLTWDQQHAFIRKLIDDPSQSSELLSEAKKLNDSQAPK

SEQ ID NO: 311 - protein, 58 aa, ARTIFICIAL SEQUENCE
  Engineered IL-17A binding polypeptide
VDAKYAKEMDYAQWEIWMLPNLTWDQQHAFIRKLIDDPSQSSELLSEAKKLNDSQAPK

SEQ ID NO: 312 - protein, 58 aa, ARTIFICIAL SEQUENCE
  Engineered IL-17A binding polypeptide
VDAKYAKEYDFAQWEIWLLPNLTWDQSHAFIQKLIDDPSQSSELLSEAKKLNDSQAPK

SEQ ID NO: 313 - protein, 58 aa, ARTIFICIAL SEQUENCE
  Engineered IL-17A binding polypeptide
VDAKYAKEADYAWFEIWLLPNLTWDQQTAFISKLNDDPSQSSELLSEAKKLNDSQAPK

SEQ ID NO: 314 - protein, 58 aa, ARTIFICIAL SEQUENCE
  Engineered IL-17A binding polypeptide
VDAKYAKEMDYAQWEIWLLPNLTWHQSNAFIRKLIDDPSQSSELLSEAKKLNDSQAPK

SEQ ID NO: 315 - protein, 58 aa, ARTIFICIAL SEQUENCE
  Engineered IL-17A binding polypeptide
VDAKYAKEHAEAWFEIWALPNLTWDQARAFIVKLNDDPSQSSELLSEAKKLNDSQAPK

SEQ ID NO: 316 - protein, 58 aa, ARTIFICIAL SEQUENCE
  Engineered IL-17A binding polypeptide
VDAKYAKEADYAWFEIWALPNLTYDQQFAFIRKLLDDPSQSSELLSEAKKLNDSQAPK

SEQ ID NO: 317 - protein, 58 aa, ARTIFICIAL SEQUENCE
  Engineered IL-17A binding polypeptide
VDAKYAKEYDNAWFEIWMLPNLTHAQAVAFIRKLNDDPSQSSELLSEAKKLNDSQAPK

SEQ ID NO: 318 - protein, 58 aa, ARTIFICIAL SEQUENCE
  Engineered IL-17A binding polypeptide
VDAKYAKEADFAWWEIWLLPNLTHDQQRAFIVKLLDDPSQSSELLSEAKKLNDSQAPK

SEQ ID NO: 319 - protein, 58 aa, ARTIFICIAL SEQUENCE
  Engineered IL-17A binding polypeptide
VDAKYAKEADFAWFEIWALPNLTHDQAVAFIRKLNDDPSQSSELLSEAKKLNDSQAPK

SEQ ID NO: 320 - protein, 58 aa, ARTIFICIAL SEQUENCE
  Engineered IL-17A binding polypeptide
VDAKYAKEHDYAWFEIWMLPNLTYDQAHAFIRKLNDDPSQSSELLSEAKKLNDSQAPK

SEQ ID NO: 321 - protein, 58 aa, ARTIFICIAL SEQUENCE
  Engineered IL-17A binding polypeptide
VDAKYAKEADEAWWEIWLLPNLTYDQQHAFIVKLIDDPSQSSELLSEAKKLNDSQAPK

SEQ ID NO: 322 - protein, 58 aa, ARTIFICIAL SEQUENCE
  Engineered IL-17A binding polypeptide
VDAKYAKEMDYAWWEIWLLPNLTHDQAYAFIVKLIDDPSQSSELLSEAKKLNDSQAPK

SEQ ID NO: 323 - protein, 58 aa, ARTIFICIAL SEQUENCE
  Engineered IL-17A binding polypeptide
VDAKYAKEYLYAWFEIWTLPNLTYDQQVAFIRKLLDDPSQSSELLSEAKKLNDSQAPK

SEQ ID NO: 324 - protein, 58 aa, ARTIFICIAL SEQUENCE
  Engineered IL-17A binding polypeptide
VDAKYAKEYDDAWFEIWTLPNLTRDQQTAFIIKLNDDPSQSSELLSEAKKLNDSQAPK

SEQ ID NO: 325 - protein, 58 aa, ARTIFICIAL SEQUENCE
  Engineered IL-17A binding polypeptide
VDAKYAKEMDEAWFEIWSLPNLTYAQQYAFIVKLIDDPSQSSELLSEAKKLNDSQAPK

SEQ ID NO: 326 - protein, 58 aa, ARTIFICIAL SEQUENCE
  Engineered IL-17A binding polypeptide
VDAKYAKEADYAWFEIWSLPNLTHVQQVAFIRKLLDDPSQSSELLSEAKKLNDSQAPK

SEQ ID NO: 327 - protein, 58 aa, ARTIFICIAL SEQUENCE
  Engineered IL-17A binding polypeptide
VDAKYAKEADEAWFEIWSLPNLTHAQARAFIQKLIDDPSQSSELLSEAKKLNDSQAPK

SEQ ID NO: 328 - protein, 58 aa, ARTIFICIAL SEQUENCE
  Engineered IL-17A binding polypeptide
VDAKYAKEYDEAWFEIWMLPNLTRDQASAFIIKLNDDPSQSSELLSEAKKLNDSQAPK

SEQ ID NO: 329 - protein, 58 aa, ARTIFICIAL SEQUENCE
  Engineered IL-17A binding polypeptide
VDAKYAKEHADAWFEIWSLPNLTHVQARAFIIKLNDDPSQSSELLSEAKKLNDSQAPK

SEQ ID NO: 330 - protein, 58 aa, ARTIFICIAL SEQUENCE
  Engineered IL-17A binding polypeptide
VDAKYAKEADFAWWEIWLLPNLTHAQQTAFIRKLLDDPSQSSELLSEAKKLNDSQAPK

SEQ ID NO: 331 - protein, 58 aa, ARTIFICIAL SEQUENCE
  Engineered IL-17A binding polypeptide
VDAKYAKEADYAWFEIWSLPNLTHAQATAFISKLNDDPSQSSELLSEAKKLNDSQAPK

SEQ ID NO: 332 - protein, 58 aa, ARTIFICIAL SEQUENCE
  Engineered IL-17A binding polypeptide
VDAKYAKEYDYAWFEIWELPNLTWDQQTAFIRKLNDDPSQSSELLSEAKKLNDSQAPK

SEQ ID NO: 333 - protein, 58 aa, ARTIFICIAL SEQUENCE
  Engineered IL-17A binding polypeptide
VDAKYAKEADYAWWEIWLLPNLTHDQATAFIRKLIDDPSQSSELLSEAKKLNDSQAPK

SEQ ID NO: 334 - protein, 58 aa, ARTIFICIAL SEQUENCE
  Engineered IL-17A binding polypeptide
VDAKYAKEADYAWWEIWSLPNLTHDQQVAFIRKLNDDPSQSSELLSEAKKLNDSQAPK

SEQ ID NO: 335 - protein, 58 aa, ARTIFICIAL SEQUENCE
  Engineered IL-17A binding polypeptide
VDAKYAKEADFAWWEIWSLPNLTHVQQVAFIRKLLDDPSQSSELLSEAKKLNDSQAPK

SEQ ID NO: 336 - protein, 58 aa, ARTIFICIAL SEQUENCE
  Engineered IL-17A binding polypeptide
VDAKYAKEADYAWFEIWALPNLTHAQQVAFIAKLNDDPSQSSELLSEAKKLNDSQAPK

SEQ ID NO: 337 - protein, 58 aa, ARTIFICIAL SEQUENCE
  Engineered IL-17A binding polypeptide
VDAKYAKEADYAWFEIWALPNLTHAQAVAFIGKLNDDPSQSSELLSEAKKLNDSQAPK

SEQ ID NO: 338 - protein, 58 aa, ARTIFICIAL SEQUENCE
  Engineered IL-17A binding polypeptide
VDAKYAKEADFAWFEIWSLPNLTHDQARAFISKLNDDPSQSSELLSEAKKLNDSQAPK

SEQ ID NO: 339 - protein, 58 aa, ARTIFICIAL SEQUENCE
  Engineered IL-17A binding polypeptide
VDAKYAKEMDEAQWEIWLLPNLTHHQANAFIRKLIDDPSQSSELLSEAKKLNDSQAPK

SEQ ID NO: 340 - protein, 58 aa, ARTIFICIAL SEQUENCE
  Engineered IL-17A binding polypeptide
VDAKYAKEADYAWFEIWALPNLTWDQAHAFIRKLNDDPSQSSELLSEAKKLNDSQAPK

SEQ ID NO: 341 - protein, 58 aa, ARTIFICIAL SEQUENCE
  Engineered IL-17A binding polypeptide
VDAKYAKEADQAWWEIWLLPNLTHDQQVAFIQKLLDDPSQSSELLSEAKKLNDSQAPK

SEQ ID NO: 342 - protein, 58 aa, ARTIFICIAL SEQUENCE
  Engineered IL-17A binding polypeptide
VDAKYAKEADEAWWEIWSLPNLTHDQAKAFIQKLLDDPSQSSELLSEAKKLNDSQAPK

SEQ ID NO: 343 - protein, 58 aa, ARTIFICIAL SEQUENCE
  Engineered IL-17A binding polypeptide
VDAKYAKEHGYAWFEIWALPNLTHDQAKAFIRKLNDDPSQSSELLSEAKKLNDSQAPK

SEQ ID NO: 344 - protein, 58 aa, ARTIFICIAL SEQUENCE
  Engineered IL-17A binding polypeptide
VDAKYAKEADYAWWEIWSLPNLTHVQQVAFIRKLIDDPSQSSELLSEAKKLNDSQAPK

SEQ ID NO: 345 - protein, 58 aa, ARTIFICIAL SEQUENCE
  Engineered IL-17A binding polypeptide
VDAKYAKEYDEAWFEIWMLPNLTYDQGRAFIGKLNDDPSQSSELLSEAKKLNDSQAPK

SEQ ID NO: 346 - protein, 58 aa, ARTIFICIAL SEQUENCE
  Engineered IL-17A binding polypeptide
VDAKYAKEADFAWWEIWALPNLTHVQAVAFIRKLLDDPSQSSELLSEAKKLNDSQAPK

SEQ ID NO: 347 - protein, 58 aa, ARTIFICIAL SEQUENCE
  Engineered IL-17A binding polypeptide
VDAKYAKEADDAWFEIWALPNLTHAQAVAFIQKLNDDPSQSSELLSEAKKLNDSQAPK

SEQ ID NO: 348 - protein, 58 aa, ARTIFICIAL SEQUENCE
  Engineered IL-17A binding polypeptide
VDAKYAKEADQAWWEIWALPNLTHDQGVAFIRKLLDDPSQSSELLSEAKKLNDSQAPK

SEQ ID NO: 349 - protein, 58 aa, ARTIFICIAL SEQUENCE
  Engineered IL-17A binding polypeptide
VDAKYAKEYDEAWFEIWLLPNLTADQARAFIVKLNDDPSQSSELLSEAKKLNDSQAPK

SEQ ID NO: 350 - protein, 58 aa, ARTIFICIAL SEQUENCE
  Engineered IL-17A binding polypeptide
VDAKYAKEADYAWWEIWALPNLTYDQQYAFIRKLNDDPSQSSELLSEAKKLNDSQAPK

SEQ ID NO: 351 - protein, 58 aa, ARTIFICIAL SEQUENCE
  Engineered IL-17A binding polypeptide
VDAKYAKEADDAWWEIWMLPNLTHDQARAFIQKLLDDPSQSSELLSEAKKLNDSQAPK

SEQ ID NO: 352 - protein, 58 aa, ARTIFICIAL SEQUENCE
  Engineered IL-17A binding polypeptide
VDAKYAKEADEAWWEIWALPNLTHRQQVAFIQKLLDDPSQSSELLSEAKKLNDSQAPK

SEQ ID NO: 353 - protein, 58 aa, ARTIFICIAL SEQUENCE
  Engineered IL-17A binding polypeptide
VDAKYAKEADFAWFEIWALPNLTHDQATAFIVKLNDDPSQSSELLSEAKKLNDSQAPK

SEQ ID NO: 354 - protein, 58 aa, ARTIFICIAL SEQUENCE
  Engineered IL-17A binding polypeptide
VDAKYAKEMDDAWWEIWALPNLTHAQAVAFIRKLLDDPSQSSELLSEAKKLNDSQAPK

SEQ ID NO: 355 - protein, 58 aa, ARTIFICIAL SEQUENCE
  Engineered IL-17A binding polypeptide
VDAKYAKEADEAWWEIWALPNLTHHQAVAFIHKLLDDPSQSSELLSEAKKLNDSQAPK

SEQ ID NO: 356 - protein, 58 aa, ARTIFICIAL SEQUENCE
  Engineered IL-17A binding polypeptide
VDAKYAKEADYAWWEIWTLPNLTHDQQYAFIQKLLDDPSQSSELLSEAKKLNDSQAPK

SEQ ID NO: 357 - protein, 58 aa, ARTIFICIAL SEQUENCE
  Engineered IL-17A binding polypeptide
VDAKYAKEMDFAQWEIWLLPNLTWHQSNAFIRKLLDDPSQSSELLSEAKKLNDSQAPK

SEQ ID NO: 358 - protein, 58 aa, ARTIFICIAL SEQUENCE
  Engineered IL-17A binding polypeptide
VDAKYAKEWDEAWFEIWSLPNLTYDQGRAFIIKLNDDPSQSSELLSEAKKLNDSQAPK

SEQ ID NO: 359 - protein, 58 aa, ARTIFICIAL SEQUENCE
  Engineered IL-17A binding polypeptide
VDAKYAKEADEAQWEIWLLPNLTHDQSNAFIRKLIDDPSQSSELLSEAKKLNDSQAPK

SEQ ID NO: 360 - protein, 58 aa, ARTIFICIAL SEQUENCE
  Engineered IL-17A binding polypeptide
VDAKYAKEADYAWWEIWALPNLTHAQQKAFIRKLLDDPSQSSELLSEAKKLNDSQAPK

SEQ ID NO: 361 - protein, 58 aa, ARTIFICIAL SEQUENCE
  Engineered IL-17A binding polypeptide
VDAKYAKEMDEAQWEIWMLPNLTWDQSHAFIAKLLDDPSQSSELLSEAKKLNDSQAPK

SEQ ID NO: 362 - protein, 58 aa, ARTIFICIAL SEQUENCE
  Engineered IL-17A binding polypeptide
VDAKYAKEADYAWWEIWSLPNLTHDQQVAFIRKLLDDPSQSSELLSEAKKLNDSQAPK

SEQ ID NO: 363 - protein, 58 aa, ARTIFICIAL SEQUENCE
  Engineered IL-17A binding polypeptide
VDAKYAKEMDDAWWEIWLLPNLTYDQQYAFIQKLLDDPSQSSELLSEAKKLNDSQAPK

SEQ ID NO: 364 - protein, 58 aa, ARTIFICIAL SEQUENCE
  Engineered IL-17A binding polypeptide
VDAKYAKEMDDAQWEIWLLPNLTWVQQNAFIRKLIDDPSQSSELLSEAKKLNDSQAPK

SEQ ID NO: 365 - protein, 58 aa, ARTIFICIAL SEQUENCE
  Engineered IL-17A binding polypeptide
VDAKYAKEMDEAQWEIWLLPNLTWHQQNAFIRKLIDDPSQSSELLSEAKKLNDSQAPK

SEQ ID NO: 366 - protein, 58 aa, ARTIFICIAL SEQUENCE
  Engineered IL-17A binding polypeptide
VDAKYAKEHDYAWFEIWALPNLTHAQAVAFIIKLNDDPSQSSELLSEAKKLNDSQAPK

SEQ ID NO: 367 - protein, 58 aa, ARTIFICIAL SEQUENCE
  Engineered IL-17A binding polypeptide
VDAKYAKEADFAWWEIWLLPNLTYDQQHAFIVKLIDDPSQSSELLSEAKKLNDSQAPK

SEQ ID NO: 368 - protein, 58 aa, ARTIFICIAL SEQUENCE
  Engineered IL-17A binding polypeptide
VDAKYAKEMLDAQWEIWMLPNLTWDQGHAFIVKLIDDPSQSSELLSEAKKLNDSQAPK

SEQ ID NO: 369 - protein, 58 aa, ARTIFICIAL SEQUENCE
  Engineered IL-17A binding polypeptide
VDAKYAKEMDNAWFEIWTLPNLTYAQQHAFIVKLIDDPSQSSELLSEAKKLNDSQAPK

SEQ ID NO: 370 - protein, 58 aa, ARTIFICIAL SEQUENCE
  Engineered IL-17A binding polypeptide
VDAKYAKEADYAWFEIWTLPNLTYDQQKAFIQKLIDDPSQSSELLSEAKKLNDSQAPK

SEQ ID NO: 371 - protein, 58 aa, ARTIFICIAL SEQUENCE
  Engineered IL-17A binding polypeptide
VDAKYAKEMDEAQIEIWLLPNLTWHQGNAFIRKLLDDPSQSSELLSEAKKLNDSQAPK

SEQ ID NO: 372 - protein, 58 aa, ARTIFICIAL SEQUENCE
  Engineered IL-17A binding polypeptide
VDAKYAKEMDNAQWEIWLLPNLTYDQSHAFIAKLIDDPSQSSELLSEAKKLNDSQAPK

SEQ ID NO: 373 - protein, 58 aa, ARTIFICIAL SEQUENCE
  Engineered IL-17A binding polypeptide
VDAKYAKEADFAWFEIWSLPNLTHDQAVAFIRKLNDDPSQSSELLSEAKKLNDSQAPK

SEQ ID NO: 374 - protein, 58 aa, ARTIFICIAL SEQUENCE
  Engineered IL-17A binding polypeptide
VDAKYAKEMDYAQWEIWMLPNLTWDQQHAFIQKLIDDPSQSSELLSEAKKLNDSQAPK

SEQ ID NO: 375 - protein, 58 aa, ARTIFICIAL SEQUENCE
  Engineered IL-17A binding polypeptide
VDAKYAKEADYAWFEIWMLPNLTWDQQTAFISKLIDDPSQSSELLSEAKKLNDSQAPK

SEQ ID NO: 376 - protein, 58 aa, ARTIFICIAL SEQUENCE
  Engineered IL-17A binding polypeptide
VDAKYAKEMDYAQWEIWLLPNLTHAQGTAFIRKLIDDPSQSSELLSEAKKLNDSQAPK

SEQ ID NO: 377 - protein, 58 aa, ARTIFICIAL SEQUENCE
  Engineered IL-17A binding polypeptide
VDAKYAKEMDYAWFEIWALPNLTYDQAHAFIIKLIDDPSQSSELLSEAKKLNDSQAPK

SEQ ID NO: 378 - protein, 58 aa, ARTIFICIAL SEQUENCE
  Engineered IL-17A binding polypeptide
VDAKYAKEMDEAWWEIWTLPNLTYDQQHAFIVKLLDDPSQSSELLSEAKKLNDSQAPK

SEQ ID NO: 379 - protein, 58 aa, ARTIFICIAL SEQUENCE
  Engineered IL-17A binding polypeptide
VDAKYAKEADQAWWEIWLLPNLTHDQQVAFIRKLLDDPSQSSELLSEAKKLNDSQAPK

SEQ ID NO: 380 - protein, 58 aa, ARTIFICIAL SEQUENCE
  Engineered IL-17A binding polypeptide
VDAKYAKEADEAWWEIWALPNLTHDQAKAFIIKLLDDPSQSSELLSEAKKLNDSQAPK

SEQ ID NO: 381 - protein, 58 aa, ARTIFICIAL SEQUENCE
  Engineered IL-17A binding polypeptide
VDAKYAKEAAEAWFEIWMLPNLTYDQAVAFIHKLNDDPSQSSELLSEAKKLNDSQAPK

SEQ ID NO: 382 - protein, 58 aa, ARTIFICIAL SEQUENCE
  Engineered IL-17A binding polypeptide
VDAKYAKEADYAWFEIWLLPNLTHVQQRAFIQKLNDDPSQSSELLSEAKKLNDSQAPK

SEQ ID NO: 383 - protein, 58 aa, ARTIFICIAL SEQUENCE
  Engineered IL-17A binding polypeptide
VDAKYAKEMDQAWFEIWALPNLTWHQARAFIVKLIDDPSQSSELLSEAKKLNDSQAPK

SEQ ID NO: 384 - protein, 58 aa, ARTIFICIAL SEQUENCE
  Engineered IL-17A binding polypeptide
VDAKYAKEHDEAWFEIWSLPNLTYDQQRAFIIKLNDDPSQSSELLSEAKKLNDSQAPK

SEQ ID NO: 385 - protein, 58 aa, ARTIFICIAL SEQUENCE
  Engineered IL-17A binding polypeptide
VDAKYAKEYDEAWFEIWMLPNLTYDQAVAFISKLNDDPSQSSELLSEAKKLNDSQAPK

SEQ ID NO: 386 - protein, 58 aa, ARTIFICIAL SEQUENCE
  Engineered IL-17A binding polypeptide
VDAKYAKEHDQAWFEIWLLPNLTYAQARAFISKLNDDPSQSSELLSEAKKLNDSQAPK

SEQ ID NO: 387 - protein, 58 aa, ARTIFICIAL SEQUENCE
  Engineered IL-17A binding polypeptide
VDAKYAKEMDFAQWEIWLLPNLTWHQSNAFIQKLIDDPSQSSELLSEAKKLNDSQAPK

SEQ ID NO: 388 - protein, 58 aa, ARTIFICIAL SEQUENCE
  Engineered IL-17A binding polypeptide
VDAKYAKEMDFAQWEIWMLPNLTWDQSNAFIQKLIDDPSQSSELLSEAKKLNDSQAPK

SEQ ID NO: 389 - protein, 58 aa, ARTIFICIAL SEQUENCE
  Engineered IL-17A binding polypeptide
VDAKYAKEMDNAQWEIWLLPNLTWAQQNAFIRKLIDDPSQSSELLSEAKKLNDSQAPK

SEQ ID NO: 390 - protein, 58 aa, ARTIFICIAL SEQUENCE
  Engineered IL-17A binding polypeptide
VDAKYAKEADYAWFEIWMLPNLTYDQAFAFIQKLIDDPSQSSELLSEAKKLNDSQAPK

SEQ ID NO: 391 - protein, 58 aa, ARTIFICIAL SEQUENCE
  Engineered IL-17A binding polypeptide
VDAKYAKEMDYAQWEIWLLPNLTWVQSHAFIQKLIDDPSQSSELLSEAKKLNDSQAPK

SEQ ID NO: 392 - protein, 58 aa, ARTIFICIAL SEQUENCE
  Engineered IL-17A binding polypeptide
VDAKYAKEADFAWWEIWALPNLTHVQAKAFIQKLIDDPSQSSELLSEAKKLNDSQAPK

SEQ ID NO: 393 - protein, 58 aa, ARTIFICIAL SEQUENCE
  Engineered IL-17A binding polypeptide
VDAKYAKEMDYAQWEIWLLPNLTWDQSHAFIVKLLDDPSQSSELLSEAKKLNDSQAPK

SEQ ID NO: 394 - protein, 58 aa, ARTIFICIAL SEQUENCE
  Engineered IL-17A binding polypeptide
VDAKYAKEADFAWWEIWLLPNLTHDQAYAFIVKLIDDPSQSSELLSEAKKLNDSQAPK

SEQ ID NO: 395 - protein, 58 aa, ARTIFICIAL SEQUENCE
  Engineered IL-17A binding polypeptide
VDAKYAKEMDNAQWEIWLLPNLTYAQQHAFIQKLIDDPSQSSELLSEAKKLNDSQAPK

SEQ ID NO: 396 - protein, 58 aa, ARTIFICIAL SEQUENCE
  Engineered IL-17A binding polypeptide
VDAKYAKEADYAWWEIWSLPNLTHVQARAFIIKLLDDPSQSSELLSEAKKLNDSQAPK

SEQ ID NO: 397 - protein, 58 aa, ARTIFICIAL SEQUENCE
  Engineered IL-17A binding polypeptide
VDAKYAKEHDEAWFEIWTLPNLTHAQARAFISKLNDDPSQSSELLSEAKKLNDSQAPK

SEQ ID NO: 398 - protein, 58 aa, ARTIFICIAL SEQUENCE
  Engineered IL-17A binding polypeptide
VDAKYAKEADYAWFEIWLLPNLTYDQQYAFIQKLNDDPSQSSELLSEAKKLNDSQAPK

SEQ ID NO: 399 - protein, 58 aa, ARTIFICIAL SEQUENCE
  Engineered IL-17A binding polypeptide
VDAKYAKEMDRAQWEIWLLPNLTYDQSHAFIQKLLDDPSQSSELLSEAKKLNDSQAPK

SEQ ID NO: 400 - protein, 58 aa, ARTIFICIAL SEQUENCE
  Engineered IL-17A binding polypeptide
VDAKYAKEMDEAWWEIWLLPNLTYDQQYAFIAKLIDDPSQSSELLSEAKKLNDSQAPK

SEQ ID NO: 401 - protein, 58 aa, ARTIFICIAL SEQUENCE
  Engineered IL-17A binding polypeptide
VDAKYAKEYDYAWFEIWLLPNLTWHQQVAFIHKLNDDPSQSSELLSEAKKLNDSQAPK

SEQ ID NO: 402 - protein, 58 aa, ARTIFICIAL SEQUENCE
  Engineered IL-17A binding polypeptide
VDAKYAKEADFAWFEIWSLPNLTWDQARAFIIKLNDDPSQSSELLSEAKKLNDSQAPK

SEQ ID NO: 403 - protein, 58 aa, ARTIFICIAL SEQUENCE
  Engineered IL-17A binding polypeptide
VDAKYAKEADFAWFEIWLLPNLTWDQQKAFIHKLNDDPSQSSELLSEAKKLNDSQAPK

SEQ ID NO: 404 - protein, 58 aa, ARTIFICIAL SEQUENCE
  Engineered IL-17A binding polypeptide
VDAKYAKEYDQAWFEIWLLPNLTWAQQVAFIQKLNDDPSQSSELLSEAKKLNDSQAPK

SEQ ID NO: 405 - protein, 58 aa, ARTIFICIAL SEQUENCE
  Engineered IL-17A binding polypeptide
VDAKYAKEMDDAQWEIWLLPNLTWDQQHAFIAKLIDDPSQSSELLSEAKKLNDSQAPK

SEQ ID NO: 406 - protein, 58 aa, ARTIFICIAL SEQUENCE
  Engineered IL-17A binding polypeptide
VDAKYAKEMDEAQWEIWLLPNLTWDQGHAFIQKLLDDPSQSSELLSEAKKLNDSQAPK

SEQ ID NO: 407 - protein, 58 aa, ARTIFICIAL SEQUENCE
  Engineered IL-17A binding polypeptide
VDAKYAKEADYAWFEIWMLPNLTHDQQYAFIHKLNDDPSQSSELLSEAKKLNDSQAPK

SEQ ID NO: 408 - protein, 58 aa, ARTIFICIAL SEQUENCE
  Engineered IL-17A binding polypeptide
VDAKYAKEADYAWFEIWALPNLTHVQQVAFIHKLNDDPSQSSELLSEAKKLNDSQAPK

SEQ ID NO: 409 - protein, 58 aa, ARTIFICIAL SEQUENCE
  Engineered IL-17A binding polypeptide
VDAKYAKEADYAWWEIWALPNLTHAQQVAFIRKLLDDPSQSSELLSEAKKLNDSQAPK

SEQ ID NO: 410 - protein, 58 aa, ARTIFICIAL SEQUENCE
  Engineered IL-17A binding polypeptide
VDAKYAKEMGQAQLEIWMLPNLTWDQGHAFIQKLIDDPSQSSELLSEAKKLNDSQAPK

SEQ ID NO: 411 - protein, 58 aa, ARTIFICIAL SEQUENCE
  Engineered IL-17A binding polypeptide
VDAKYAKEMDEAQWEIWLLPNLTWHQSHAFISKLIDDPSQSSELLSEAKKLNDSQAPK

SEQ ID NO: 412 - protein, 58 aa, ARTIFICIAL SEQUENCE
  Engineered IL-17A binding polypeptide
VDAKYAKEMDYAQWEIWLLPNLTWHQQHAFIVKLLDDPSQSSELLSEAKKLNDSQAPK

SEQ ID NO: 413 - protein, 58 aa, ARTIFICIAL SEQUENCE
  Engineered IL-17A binding polypeptide
VDAKYAKEADEAQWEIWLLPNLTWDQSNAFIRKLIDDPSQSSELLSEAKKLNDSQAPK

SEQ ID NO: 414 - protein, 58 aa, ARTIFICIAL SEQUENCE
  Engineered IL-17A binding polypeptide
VDAKYAKEYDYAWFEIWLLPNLTRDQQRAFIIKLNDDPSQSSELLSEAKKLNDSQAPK

SEQ ID NO: 415 - protein, 58 aa, ARTIFICIAL SEQUENCE
  Engineered IL-17A binding polypeptide
VDAKYAKEHAEAWFEIWALPNLTWVQARAFIVKLNDDPSQSSELLSEAKKLNDSQAPK

SEQ ID NO: 416 - protein, 58 aa, ARTIFICIAL SEQUENCE
  Engineered IL-17A binding polypeptide
VDAKYAKEADYAWFEIWLLPNLTYHQQVAFIHKLNDDPSQSSELLSEAKKLNDSQAPK

SEQ ID NO: 417 - protein, 58 aa, ARTIFICIAL SEQUENCE
  Engineered IL-17A binding polypeptide
VDAKYAKEYDFAWFEIWLLPNLTWDQQVAFISKLNDDPSQSSELLSEAKKLNDSQAPK

SEQ ID NO: 418 - protein, 58 aa, ARTIFICIAL SEQUENCE
  Engineered IL-17A binding polypeptide
VDAKYAKEMDEAQWEIWLLPNLTWDQSNAFIRKLLDDPSQSSELLSEAKKLNDSQAPK

SEQ ID NO: 419 - protein, 58 aa, ARTIFICIAL SEQUENCE
  Engineered IL-17A binding polypeptide
VDAKYAKEMDEAQIEIWLLPNLTWAQGHAFIQKLIDDPSQSSELLSEAKKLNDSQAPK

SEQ ID NO: 420 - protein, 58 aa, ARTIFICIAL SEQUENCE
  Engineered IL-17A binding polypeptide
VDAKYAKEADYAWFEIWLLPNLTYHQQYAFIQKLNDDPSQSSELLSEAKKLNDSQAPK

SEQ ID NO: 421 - protein, 58 aa, ARTIFICIAL SEQUENCE
  Engineered IL-17A binding polypeptide
VDAKYAKEMDEAQWEIWLLPNLTWDQQNAFIRKLIDDPSQSSELLSEAKKLNDSQAPK

SEQ ID NO: 422 - protein, 58 aa, ARTIFICIAL SEQUENCE
  Engineered IL-17A binding polypeptide
VDAKYAKEYDQAWFEIWLLPNLTYAQQFAFIRKLNDDPSQSSELLSEAKKLNDSQAPK

SEQ ID NO: 423 - protein, 58 aa, ARTIFICIAL SEQUENCE
  Engineered IL-17A binding polypeptide
VDAKYAKEMGEAQLEIWLLPNLTWHQQNAFIRKLIDDPSQSSELLSEAKKLNDSQAPK

SEQ ID NO: 424 - protein, 58 aa, ARTIFICIAL SEQUENCE
  Engineered IL-17A binding polypeptide
VDAKYAKEMDYAQWEIWLLPNLTYDQQHAFIVKLIDDPSQSSELLSEAKKLNDSQAPK

SEQ ID NO: 425 - protein, 58 aa, ARTIFICIAL SEQUENCE
  Engineered IL-17A binding polypeptide
VDAKYAKEMDEAWWEIWLLPNLTYAQGRAFIVKLLDDPSQSSELLSEAKKLNDSQAPK

SEQ ID NO: 426 - protein, 58 aa, ARTIFICIAL SEQUENCE
  Engineered IL-17A binding polypeptide
VDAKYAKEMDEAWWEIWLLPNLTYDQQYAFISKLIDDPSQSSELLSEAKKLNDSQAPK

SEQ ID NO: 427 - protein, 58 aa, ARTIFICIAL SEQUENCE
  Engineered IL-17A binding polypeptide
VDAKYAKEYDYAWFEIWMLPNLTYDQQVAFISKLNDDPSQSSELLSEAKKLNDSQAPK

SEQ ID NO: 428 - protein, 58 aa, ARTIFICIAL SEQUENCE
  Engineered IL-17A binding polypeptide
VDAKYAKEMDEAQWEIWMLPNLTWDQQNAFIRKLIDDPSQSSELLSEAKKLNDSQAPK

SEQ ID NO: 429 - protein, 58 aa, ARTIFICIAL SEQUENCE
  Engineered IL-17A binding polypeptide
VDAKYAKEMDFAQWEIWMLPNLTWDQSHAFIQKLIDDPSQSSELLSEAKKLNDSQAPK

SEQ ID NO: 430 - protein, 58 aa, ARTIFICIAL SEQUENCE
  Engineered IL-17A binding polypeptide
VDAKYAKEYDYAWFEIWLLPNLTYDQQHAFIVKLNDDPSQSSELLSEAKKLNDSQAPK

SEQ ID NO: 431 - protein, 58 aa, ARTIFICIAL SEQUENCE
  Engineered IL-17A binding polypeptide
VDAKYAKEADFAWWEIWALPNLTHDQARAFIVKLIDDPSQSSELLSEAKKLNDSQAPK

SEQ ID NO: 432 - protein, 58 aa, ARTIFICIAL SEQUENCE
  Engineered IL-17A binding polypeptide
VDAKYAKEADYAWFEIWLLPNLTYDQATAFISKLNDDPSQSSELLSEAKKLNDSQAPK

SEQ ID NO: 433 - protein, 58 aa, ARTIFICIAL SEQUENCE
  Engineered IL-17A binding polypeptide
VDAKYAKEMDYAQWEIWLLPNLTHDQGRAFIQKLIDDPSQSSELLSEAKKLNDSQAPK

SEQ ID NO: 434 - protein, 58 aa, ARTIFICIAL SEQUENCE
  Engineered IL-17A binding polypeptide
VDAKYAKEMDEAQWEIWLLPNLTWDQGNAFISKLIDDPSQSSELLSEAKKLNDSQAPK

SEQ ID NO: 435 - protein, 58 aa, ARTIFICIAL SEQUENCE
  Engineered IL-17A binding polypeptide
VDAKYAKEADYAWWEIWSLPNLTHAQAYAFIVKLIDDPSQSSELLSEAKKLNDSQAPK

SEQ ID NO: 436 - protein, 58 aa, ARTIFICIAL SEQUENCE
  Engineered IL-17A binding polypeptide
VDAKYAKEYDNAWFEIWALPNLTYAQAYAFIRKLNDDPSQSSELLSEAKKLNDSQAPK

SEQ ID NO: 437 - protein, 58 aa, ARTIFICIAL SEQUENCE
  Engineered IL-17A binding polypeptide
VDAKYAKEMDEAQWEIWMLPNLTYAQSHAFIVKLIDDPSQSSELLSEAKKLNDSQAPK

SEQ ID NO: 438 - protein, 58 aa, ARTIFICIAL SEQUENCE
  Engineered IL-17A binding polypeptide
VDAKYAKEADYAWFEIWMLPNLTRDQATAFIIKLNDDPSQSSELLSEAKKLNDSQAPK

SEQ ID NO: 439 - protein, 58 aa, ARTIFICIAL SEQUENCE
  Engineered IL-17A binding polypeptide
VDAKYAKEADYAWFEIWALPNLTWHQATAFIIKLNDDPSQSSELLSEAKKLNDSQAPK

SEQ ID NO: 440 - protein, 58 aa, ARTIFICIAL SEQUENCE
  Engineered IL-17A binding polypeptide
VDAKYAKEADYAWFEIWALPNLTWDQQRAFISKLNDDPSQSSELLSEAKKLNDSQAPK

SEQ ID NO: 441 - protein, 58 aa, ARTIFICIAL SEQUENCE
  Engineered IL-17A binding polypeptide
VDAKYAKEADYAWWEIWTLPNLTYDQSRAFIVKLLDDPSQSSELLSEAKKLNDSQAPK

SEQ ID NO: 442 - protein, 58 aa, ARTIFICIAL SEQUENCE
  Engineered IL-17A binding polypeptide
VDAKYAKEADYAWFEIWELPNLTHDQAVAFIRKLNDDPSQSSELLSEAKKLNDSQAPK

SEQ ID NO: 443 - protein, 58 aa, ARTIFICIAL SEQUENCE
  Engineered IL-17A binding polypeptide
VDAKYAKEMDEAQWEIWLLPNLTHDQGRAFIQKLIDDPSQSSELLSEAKKLNDSQAPK

SEQ ID NO: 444 - protein, 58 aa, ARTIFICIAL SEQUENCE
  Engineered IL-17A binding polypeptide
VDAKYAKEMDNAQWEIWLLPNLTWHQSNAFIQKLIDDPSQSSELLSEAKKLNDSQAPK

SEQ ID NO: 445 - protein, 58 aa, ARTIFICIAL SEQUENCE
  Engineered IL-17A binding polypeptide
VDAKYAKEMDDAQWEIWLLPNLTWDQSNAFIRKLIDDPSQSSELLSEAKKLNDSQAPK

SEQ ID NO: 446 - protein, 58 aa, ARTIFICIAL SEQUENCE
  Engineered IL-17A binding polypeptide
VDAKYAKEMDFAQWEIWLLPNLTWHQQHAFIVKLLDDPSQSSELLSEAKKLNDSQAPK

SEQ ID NO: 447 - protein, 58 aa, ARTIFICIAL SEQUENCE
  Engineered IL-17A binding polypeptide
VDAKYAKEHGYAWFEIWALPNLTWDQQVAFIIKLNDDPSQSSELLSEAKKLNDSQAPK

SEQ ID NO: 448 - protein, 58 aa, ARTIFICIAL SEQUENCE
  Engineered IL-17A binding polypeptide
VDAKYAKEMDYAQWEIWLLPNLTWAQSNAFIAKLIDDPSQSSELLSEAKKLNDSQAPK

SEQ ID NO: 449 - protein, 58 aa, ARTIFICIAL SEQUENCE
  Engineered IL-17A binding polypeptide
VDAKYAKEMDEAQWEIWMLPNLTWHQSHAFIVKLLDDPSQSSELLSEAKKLNDSQAPK

SEQ ID NO: 450 - protein, 58 aa, ARTIFICIAL SEQUENCE
  Engineered IL-17A binding polypeptide
VDAKYAKEMDFAQWEIWLLPNLTWVQSNAFIRKLIDDPSQSSELLSEAKKLNDSQAPK

SEQ ID NO: 451 - protein, 58 aa, ARTIFICIAL SEQUENCE
  Engineered IL-17A binding polypeptide
VDAKYAKEMDNAQWEIWLLPNLTHDQGNAFIRKLIDDPSQSSELLSEAKKLNDSQAPK

SEQ ID NO: 452 - protein, 58 aa, ARTIFICIAL SEQUENCE
  Engineered IL-17A binding polypeptide
VDAKYAKEYDYAWFEIWLLPNLTWDQATAFIRKLNDDPSQSSELLSEAKKLNDSQAPK

SEQ ID NO: 453 - protein, 58 aa, ARTIFICIAL SEQUENCE
  Engineered IL-17A binding polypeptide
VDAKYAKEMDYAQWEIWLLPNLTYDQQHAFIIKLIDDPSQSSELLSEAKKLNDSQAPK

SEQ ID NO: 454 - protein, 58 aa, ARTIFICIAL SEQUENCE
  Engineered IL-17A binding polypeptide
VDAKYAKEMDQAQWEIWLLPNLTWDQQRAFIVKLIDDPSQSSELLSEAKKLNDSQAPK

SEQ ID NO: 455 - protein, 58 aa, ARTIFICIAL SEQUENCE
  Engineered IL-17A binding polypeptide
VDAKYAKEMDEAQWEIWLLPNLTWHQSHAFIQKLLDDPSQSSELLSEAKKLNDSQAPK

SEQ ID NO: 456 - protein, 58 aa, ARTIFICIAL SEQUENCE
  Engineered IL-17A binding polypeptide
VDAKYAKEYDQAWFEIWLLPNLTWDQAVAFIIKLNDDPSQSSELLSEAKKLNDSQAPK

SEQ ID NO: 457 - protein, 58 aa, ARTIFICIAL SEQUENCE
  Engineered IL-17A binding polypeptide
VDAKYAKEMGDAQWEIWLLPNLTWAQQNAFIRKLIDDPSQSSELLSEAKKLNDSQAPK

SEQ ID NO: 458 - protein, 58 aa, ARTIFICIAL SEQUENCE
  Engineered IL-17A binding polypeptide
VDAKYAKEMDEAQWEIWLLPNLTWAQGHAFISKLLDDPSQSSELLSEAKKLNDSQAPK

SEQ ID NO: 459 - protein, 58 aa, ARTIFICIAL SEQUENCE
  Engineered IL-17A binding polypeptide
VDAKYAKEMDDAQWEIWTLPNLTWHQQNAFIRKLIDDPSQSSELLSEAKKLNDSQAPK

SEQ ID NO: 460 - protein, 58 aa, ARTIFICIAL SEQUENCE
  Engineered IL-17A binding polypeptide
VDAKYAKEADDAWWEIWALPNLTWDQARAFIVKLLDDPSQSSELLSEAKKLNDSQAPK

SEQ ID NO: 461 - protein, 58 aa, ARTIFICIAL SEQUENCE
  Engineered IL-17A binding polypeptide
VDAKYAKEMDFAQWEIWLLPNLTWDQGHAFISKLIDDPSQSSELLSEAKKLNDSQAPK

SEQ ID NO: 462 - protein, 58 aa, ARTIFICIAL SEQUENCE
  Engineered IL-17A binding polypeptide
VDAKYAKEMDFAWFEIWALPNLTYDQQVAFIRKLIDDPSQSSELLSEAKKLNDSQAPK

SEQ ID NO: 463 - protein, 58 aa, ARTIFICIAL SEQUENCE
  Engineered IL-17A binding polypeptide
VDAKYAKEWDEAWFEIWALPNLTYDQAVAFIHKLNDDPSQSSELLSEAKKLNDSQAPK

SEQ ID NO: 464 - protein, 58 aa, ARTIFICIAL SEQUENCE
  Engineered IL-17A binding polypeptide
VDAKYAKEMDNAQWEIWLLPNLTWDQSHAFIVKLLDDPSQSSELLSEAKKLNDSQAPK

SEQ ID NO: 465 - protein, 58 aa, ARTIFICIAL SEQUENCE
  Engineered IL-17A binding polypeptide
VDAKYAKEYDDAWFEIWTLPNLTYVQQYAFIRKLNDDPSQSSELLSEAKKLNDSQAPK

SEQ ID NO: 466 - protein, 58 aa, ARTIFICIAL SEQUENCE
  Engineered IL-17A binding polypeptide
VDAKYAKEHAEAWFEIWSLPNLTWDQQVAFIGKLNDDPSQSSELLSEAKKLNDSQAPK

SEQ ID NO: 467 - protein, 58 aa, ARTIFICIAL SEQUENCE
  Engineered IL-17A binding polypeptide
VDAKYAKEMGEAQWEIWLLPNLTYDQSHAFIVKLLDDPSQSSELLSEAKKLNDSQAPK

SEQ ID NO: 468 - protein, 58 aa, ARTIFICIAL SEQUENCE
  Engineered IL-17A binding polypeptide
VDAKYAKEHDYAWFEIWALPNLTHDQARAFIHKLNDDPSQSSELLSEAKKLNDSQAPK

SEQ ID NO: 469 - protein, 58 aa, ARTIFICIAL SEQUENCE
  Engineered IL-17A binding polypeptide
VDAKYAKEADYAWFEIWALPNLTWDQQRAFIVKLNDDPSQSSELLSEAKKLNDSQAPK

SEQ ID NO: 470 - protein, 58 aa, ARTIFICIAL SEQUENCE
  Engineered IL-17A binding polypeptide
VDAKYAKEADYAWFEIWSLPNLTYHQARAFIQKLIDDPSQSSELLSEAKKLNDSQAPK

SEQ ID NO: 471 - protein, 58 aa, ARTIFICIAL SEQUENCE
  Engineered IL-17A binding polypeptide
VDAKYAKEADYAWFEIWLLPNLTYDQAVAFIGKLNDDPSQSSELLSEAKKLNDSQAPK

SEQ ID NO: 472 - protein, 58 aa, ARTIFICIAL SEQUENCE
  Engineered IL-17A binding polypeptide
VDAKYAKEMDRAQLEIWLLPNLTWAQGNAFIRKLIDDPSQSSELLSEAKKLNDSQAPK

SEQ ID NO: 473 - protein, 58 aa, ARTIFICIAL SEQUENCE
  Engineered IL-17A binding polypeptide
VDAKYAKEMNQAQWEIWLLPNLTWHQSHAFIQKLIDDPSQSSELLSEAKKLNDSQAPK

SEQ ID NO: 474 - protein, 58 aa, ARTIFICIAL SEQUENCE
  Engineered IL-17A binding polypeptide
VDAKYAKEHAEAWFEIWLLPNLTWRQQRAFIIKLNDDPSQSSELLSEAKKLNDSQAPK

SEQ ID NO: 475 - protein, 58 aa, ARTIFICIAL SEQUENCE
  Engineered IL-17A binding polypeptide
VDAKYAKEMDQAQWEIWLLPNLTWDQSHAFISKLLDDPSQSSELLSEAKKLNDSQAPK

SEQ ID NO: 476 - protein, 58 aa, ARTIFICIAL SEQUENCE
  Engineered IL-17A binding polypeptide
VDAKYAKEMDEAQWEIWLLPNLTHAQSHAFIQKLIDDPSQSSELLSEAKKLNDSQAPK

SEQ ID NO: 477 - protein, 58 aa, ARTIFICIAL SEQUENCE
  Engineered IL-17A binding polypeptide
VDAKYAKEMDEAQWEIWLLPNLTWHQGNAFIQKLLDDPSQSSELLSEAKKLNDSQAPK

SEQ ID NO: 478 - protein, 58 aa, ARTIFICIAL SEQUENCE
  Engineered IL-17A binding polypeptide
VDAKYAKEMDEAWWEIWLLPNLTYDQQRAFIVKLLDDPSQSSELLSEAKKLNDSQAPK

SEQ ID NO: 479 - protein, 58 aa, ARTIFICIAL SEQUENCE
  Engineered IL-17A binding polypeptide
VDAKYAKEYDYAWFEIWLLPNLTHAQARAFIHKLNDDPSQSSELLSEAKKLNDSQAPK

SEQ ID NO: 480 - protein, 58 aa, ARTIFICIAL SEQUENCE
  Engineered IL-17A binding polypeptide
VDAKYAKEHAEAWFEIWMLPNLTWAQQRAFIGKLNDDPSQSSELLSEAKKLNDSQAPK

SEQ ID NO: 481 - protein, 58 aa, ARTIFICIAL SEQUENCE
  Engineered IL-17A binding polypeptide
VDAKYAKEMDDAQWEIWLLPNLTWDQSHAFIAKLIDDPSQSSELLSEAKKLNDSQAPK

SEQ ID NO: 482 - protein, 58 aa, ARTIFICIAL SEQUENCE
  Engineered IL-17A binding polypeptide
VDAKYAKEYDEAWFEIWALPNLTHAQAVAFIRKLNDDPSQSSELLSEAKKLNDSQAPK

SEQ ID NO: 483 - protein, 58 aa, ARTIFICIAL SEQUENCE
  Engineered IL-17A binding polypeptide
VDAKYAKEYDFAWFEIWLLPNLTWDQQRAFISKLNDDPSQSSELLSEAKKLNDSQAPK

SEQ ID NO: 484 - protein, 58 aa, ARTIFICIAL SEQUENCE
  Engineered IL-17A binding polypeptide
VDAKYAKEMDEAQWEIWLLPNLTWHQAHAFIRKLIDDPSQSSELLSEAKKLNDSQAPK

SEQ ID NO: 485 - protein, 58 aa, ARTIFICIAL SEQUENCE
  Engineered IL-17A binding polypeptide
VDAKYAKEHDFAWFEIWLLPNLTWDQQVAFIHKLNDDPSQSSELLSEAKKLNDSQAPK

SEQ ID NO: 486 - protein, 58 aa, ARTIFICIAL SEQUENCE
  Engineered IL-17A binding polypeptide
VDAKYAKEWDEAQWEIWLLPNLTWDQSHAFIQKLIDDPSQSSELLSEAKKLNDSQAPK

SEQ ID NO: 487 - protein, 58 aa, ARTIFICIAL SEQUENCE
  Engineered IL-17A binding polypeptide
VDAKYAKEMGRAQIEIWLLPNLTWDQGNAFIRKLIDDPSQSSELLSEAKKLNDSQAPK

SEQ ID NO: 488 - protein, 58 aa, ARTIFICIAL SEQUENCE
  Engineered IL-17A binding polypeptide
VDAKYAKEMDDAQWEIWMLPNLTWHQQHAFIQKLIDDPSQSSELLSEAKKLNDSQAPK

SEQ ID NO: 489 - protein, 58 aa, ARTIFICIAL SEQUENCE
  Engineered IL-17A binding polypeptide
VDAKYAKEADYAWFEIWLLPNLTYDQQYAFIRKLNDDPSQSSELLSEAKKLNDSQAPK

SEQ ID NO: 490 - protein, 58 aa, ARTIFICIAL SEQUENCE
  Engineered IL-17A binding polypeptide
VDAKYAKEADYAWFEIWTLPNLTHDQAKAFIVKLNDDPSQSSELLSEAKKLNDSQAPK

SEQ ID NO: 491 - protein, 58 aa, ARTIFICIAL SEQUENCE
  Engineered IL-17A binding polypeptide
VDAKYAKEMDEAQWEIWLLPNLTWHQSNAFIRKLLDDPSQSSELLSEAKKLNDSQAPK

SEQ ID NO: 492 - protein, 58 aa, ARTIFICIAL SEQUENCE
  Engineered IL-17A binding polypeptide
VDAKYAKEMDYAQWEIWLLPNLTWVQQNAFIRKLIDDPSQSSELLSEAKKLNDSQAPK

SEQ ID NO: 493 - protein, 58 aa, ARTIFICIAL SEQUENCE
  Engineered IL-17A binding polypeptide
VDAKYAKEADYAWWEIWALPNLTHDQAVAFIRKLIDDPSQSSELLSEAKKLNDSQAPK

SEQ ID NO: 494 - protein, 58 aa, ARTIFICIAL SEQUENCE
  Engineered IL-17A binding polypeptide
VDAKYAKEADYAWFEIWALPNLTHRQQVAFIRKLNDDPSQSSELLSEAKKLNDSQAPK

SEQ ID NO: 495 - protein, 58 aa, ARTIFICIAL SEQUENCE
  Engineered IL-17A binding polypeptide
VDAKYAKEMDQAQWEIWLLPNLTWHQQHAFIRKLIDDPSQSSELLSEAKKLNDSQAPK

SEQ ID NO: 496 - protein, 58 aa, ARTIFICIAL SEQUENCE
  Engineered IL-17A binding polypeptide
VDAKYAKEMNEAQLEIWLLPNLTWAQGHAFIQKLIDDPSQSSELLSEAKKLNDSQAPK

SEQ ID NO: 497 - protein, 58 aa, ARTIFICIAL SEQUENCE
  Engineered IL-17A binding polypeptide
VDAKYAKEADEAWWEIWALPNLTHHQAVAFIRKLLDDPSQSSELLSEAKKLNDSQAPK

SEQ ID NO: 498 - protein, 58 aa, ARTIFICIAL SEQUENCE
  Engineered IL-17A binding polypeptide
VDAKYAKEYDYAWFEIWLLPNLTYRQARAFIIKLNDDPSQSSELLSEAKKLNDSQAPK

SEQ ID NO: 499 - protein, 58 aa, ARTIFICIAL SEQUENCE
  Engineered IL-17A binding polypeptide
VDAKYAKEMGEAQWEIWLLPNLTWDQQHAFIQKLIDDPSQSSELLSEAKKLNDSQAPK

SEQ ID NO: 500 - protein, 58 aa, ARTIFICIAL SEQUENCE
  Engineered IL-17A binding polypeptide
VDAKYAKEYDYAWFEIWLLPNLTADQQRAFIHKLNDDPSQSSELLSEAKKLNDSQAPK

SEQ ID NO: 501 - protein, 58 aa, ARTIFICIAL SEQUENCE
  Engineered IL-17A binding polypeptide
VDAKYAKEHDEAWFEIWLLPNLTWDQQVAFIRKLNDDPSQSSELLSEAKKLNDSQAPK

SEQ ID NO: 502 - protein, 58 aa, ARTIFICIAL SEQUENCE
  Engineered IL-17A binding polypeptide
VDAKYAKEYDDAWFEIWLLPNLTWAQQRAFISKLNDDPSQSSELLSEAKKLNDSQAPK

SEQ ID NO: 503 - protein, 58 aa, ARTIFICIAL SEQUENCE
  Engineered IL-17A binding polypeptide
VDAKYAKEYDEAWFEIWLLPNLTRDQGKAFIHKLNDDPSQSSELLSEAKKLNDSQAPK

SEQ ID NO: 504 - protein, 58 aa, ARTIFICIAL SEQUENCE
  Engineered IL-17A binding polypeptide
VDAKYAKEYDDAWFEIWLLPNLTHAQARAFIVKLNDDPSQSSELLSEAKKLNDSQAPK

SEQ ID NO: 505 - protein, 58 aa, ARTIFICIAL SEQUENCE
  Engineered IL-17A binding polypeptide
VDAKYAKEHAEAWFEIWLLPNLTYRQQVAFISKLNDDPSQSSELLSEAKKLNDSQAPK

SEQ ID NO: 506 - protein, 58 aa, ARTIFICIAL SEQUENCE
  Engineered IL-17A binding polypeptide
VDAKYAKEADYAWFEIWMLPNLTRDQAVAFIGKLNDDPSQSSELLSEAKKLNDSQAPK

SEQ ID NO: 507 - protein, 58 aa, ARTIFICIAL SEQUENCE
  Engineered IL-17A binding polypeptide
VDAKYAKEMDEAQWEIWLLPNLTWHQQKAFIQKLIDDPSQSSELLSEAKKLNDSQAPK

SEQ ID NO: 508 - protein, 58 aa, ARTIFICIAL SEQUENCE
  Engineered IL-17A binding polypeptide
VDAKYAKEADYAWFEIWMLPNLTYAQQRAFIVKLLDDPSQSSELLSEAKKLNDSQAPK

SEQ ID NO: 509 - protein, 58 aa, ARTIFICIAL SEQUENCE
  Engineered IL-17A binding polypeptide
VDAKYAKEMDEAQWEIWLLPNLTHAQGRAFIQKLIDDPSQSSELLSEAKKLNDSQAPK

SEQ ID NO: 510 - protein, 58 aa, ARTIFICIAL SEQUENCE
  Engineered IL-17A binding polypeptide
VDAKYAKEMDYAQWEIWLLPNLTWHQSNAFIQKLIDDPSQSSELLSEAKKLNDSQAPK

SEQ ID NO: 511 - protein, 58 aa, ARTIFICIAL SEQUENCE
  Engineered IL-17A binding polypeptide
VDAKYAKEMDEAQWEIWLLPNLTYAQSRAFIVKLIDDPSQSSELLSEAKKLNDSQAPK

SEQ ID NO: 512 - protein, 58 aa, ARTIFICIAL SEQUENCE
  Engineered IL-17A binding polypeptide
VDAKYAKEMDYAQWEIWLLPNLTWDQSRAFIVKLLDDPSQSSELLSEAKKLNDSQAPK

SEQ ID NO: 513 - protein, 58 aa, ARTIFICIAL SEQUENCE
  Engineered IL-17A binding polypeptide
VDAKYAKEMDQAQWEIWLLPNLTYDQGRAFIQKLIDDPSQSSELLSEAKKLNDSQAPK

SEQ ID NO: 514 - protein, 58 aa, ARTIFICIAL SEQUENCE
  Engineered IL-17A binding polypeptide
VDAKYAKEMDYAQWEIWLLPNLTHDQSRAFISKLIDDPSQSSELLSEAKKLNDSQAPK

SEQ ID NO: 515 - protein, 58 aa, ARTIFICIAL SEQUENCE
  Engineered IL-17A binding polypeptide
VDAKYAKEMDEAQWEIWMLPNLTHAQSRAFIQKLIDDPSQSSELLSEAKKLNDSQAPK

SEQ ID NO: 516 - protein, 58 aa, ARTIFICIAL SEQUENCE
  Engineered IL-17A binding polypeptide
VDAKYAKEMDEAWWEIWTLPNLTYDQARAFIVKLIDDPSQSSELLSEAKKLNDSQAPK

SEQ ID NO: 517 - protein, 58 aa, ARTIFICIAL SEQUENCE
  Engineered IL-17A binding polypeptide
VDAKYAKEMDNAQWEIWLLPNLTWDQSRAFIQKLIDDPSQSSELLSEAKKLNDSQAPK

SEQ ID NO: 518 - protein, 58 aa, ARTIFICIAL SEQUENCE
  Engineered IL-17A binding polypeptide
VDAKYAKEADYAWFEIWTLPNLTRDQARAFIHKLNDDPSQSSELLSEAKKLNDSQAPK

SEQ ID NO: 519 - protein, 58 aa, ARTIFICIAL SEQUENCE
  Engineered IL-17A binding polypeptide
VDAKYAKEMDNAQWEIWLLPNLTWDQSRAFIVKLIDDPSQSSELLSEAKKLNDSQAPK

SEQ ID NO: 520 - protein, 58 aa, ARTIFICIAL SEQUENCE
  Engineered IL-17A binding polypeptide
VDAKYAKEADDAAYEIAFLPNLTWDQWYAFIQKLRDDPSQSSELLSEAKKLNDSQAPK

SEQ ID NO: 521 - protein, 58 aa, ARTIFICIAL SEQUENCE
  Engineered IL-17A binding polypeptide
VDAKYAKEADLAAVEIAELPNLTWDQWWAFIQKLRDDPSQSSELLSEAKKLNDSQAPK

SEQ ID NO: 522 - protein, 58 aa, ARTIFICIAL SEQUENCE
  Engineered IL-17A binding polypeptide
VDAKYAKEADDAALEIADLPNLTWEQWYAFISKLRDDPSQSSELLSEAKKLNDSQAPK

SEQ ID NO: 523 - protein, 58 aa, ARTIFICIAL SEQUENCE
  Engineered IL-17A binding polypeptide
VDAKYAKEADQAAYEIAYLPNLTWDQWFAFIEKLRDDPSQSSELLSEAKKLNDSQAPK

SEQ ID NO: 524 - protein, 58 aa, ARTIFICIAL SEQUENCE
  Engineered IL-17A binding polypeptide
VDAKYAKEADQAAVEIADLPNLTWDQWWAFIEKLRDDPSQSSELLSEAKKLNDSQAPK

SEQ ID NO: 525 - protein, 58 aa, ARTIFICIAL SEQUENCE
  Engineered IL-17A binding polypeptide
VDAKYAKEADEAAMEIADLPNLTWDQWWAFISKLRDDPSQSSELLSEAKKLNDSQAPK

SEQ ID NO: 526 - protein, 58 aa, ARTIFICIAL SEQUENCE
  Engineered IL-17A binding polypeptide
VDAKYAKEADMAAFEIALLPNLTWDQWEAFIGKLRDDPSQSSELLSEAKKLNDSQAPK

SEQ ID NO: 527 - protein, 58 aa, ARTIFICIAL SEQUENCE
  Engineered IL-17A binding polypeptide
VDAKYAKEADDAAVEIADLPNLTWDQWWAFIRKLRDDPSQSSELLSEAKKLNDSQAPK

SEQ ID NO: 528 - protein, 58 aa, ARTIFICIAL SEQUENCE
  Engineered IL-17A binding polypeptide
VDAKYAKEADDAAVEIAELPNLTWEQWYAFIDKLRDDPSQSSELLSEAKKLNDSQAPK

SEQ ID NO: 529 - protein, 58 aa, ARTIFICIAL SEQUENCE
  Engineered IL-17A binding polypeptide
VDAKYAKEADEAAVEIAALPNLTWDQWFAFIDKLRDDPSQSSELLSEAKKLNDSQAPK

SEQ ID NO: 530 - protein, 58 aa, ARTIFICIAL SEQUENCE
  Engineered IL-17A binding polypeptide
VDAKYAKEADEAAYEIAFLPNLTWDQWYAFITKLRDDPSQSSELLSEAKKLNDSQAPK

SEQ ID NO: 531 - protein, 58 aa, ARTIFICIAL SEQUENCE
  Engineered IL-17A binding polypeptide
VDAKYAKEADNAALEIADLPNLTWDQWYAFIAKLRDDPSQSSELLSEAKKLNDSQAPK

SEQ ID NO: 532 - protein, 58 aa, ARTIFICIAL SEQUENCE
  Engineered IL-17A binding polypeptide
VDAKYAKEADDAAVEIANLPNLTWDQWWAFITKLRDDPSQSSELLSEAKKLNDSQAPK

SEQ ID NO: 533 - protein, 58 aa, ARTIFICIAL SEQUENCE
  Engineered IL-17A binding polypeptide
VDAKYAKEADEAAYEIAFLPNLTWDQWFAFINKLRDDPSQSSELLSEAKKLNDSQAPK

SEQ ID NO: 534 - protein, 58 aa, ARTIFICIAL SEQUENCE
  Engineered IL-17A binding polypeptide
VDAKYAKEADDAALEIADLPNLTWDQWIAFINKLRDDPSQSSELLSEAKKLNDSQAPK

SEQ ID NO: 535 - protein, 58 aa, ARTIFICIAL SEQUENCE
  Engineered IL-17A binding polypeptide
VDAKYAKEADNAAMEIADLPNLTWDQWFAFINKLRDDPSQSSELLSEAKKLNDSQAPK

SEQ ID NO: 536 - protein, 58 aa, ARTIFICIAL SEQUENCE
  Engineered IL-17A binding polypeptide
VDAKYAKEADDAAFEIAFLPNLTWDQWWAFINKLRDDPSQSSELLSEAKKLNDSQAPK

SEQ ID NO: 537 - protein, 58 aa, ARTIFICIAL SEQUENCE
  Engineered IL-17A binding polypeptide
VDAKYAKEADDAAMEIAELPNLTWDQWYAFINKLRDDPSQSSELLSEAKKLNDSQAPK

SEQ ID NO: 538 - protein, 58 aa, ARTIFICIAL SEQUENCE
  Engineered IL-17A binding polypeptide
VDAKYAKEADDAAVEIAYLPNLTWDQWFAFIDKLRDDPSQSSELLSEAKKLNDSQAPK

SEQ ID NO: 539 - protein, 58 aa, ARTIFICIAL SEQUENCE
  Engineered IL-17A binding polypeptide
VDAKYAKEADSAAVEIADLPNLTWDQWYAFINKLRDDPSQSSELLSEAKKLNDSQAPK

SEQ ID NO: 540 - protein, 58 aa, ARTIFICIAL SEQUENCE
  Engineered IL-17A binding polypeptide
VDAKYAKEADEAAYEIAFLPNLTWDQWAAFIEKLRDDPSQSSELLSEAKKLNDSQAPK

SEQ ID NO: 541 - protein, 58 aa, ARTIFICIAL SEQUENCE
  Engineered IL-17A binding polypeptide
VDAKYAKEADMAAMEIADLPNLTWDQWWAFIWKLRDDPSQSSELLSEAKKLNDSQAPK

SEQ ID NO: 542 - protein, 58 aa, ARTIFICIAL SEQUENCE
  Engineered IL-17A binding polypeptide
VDAKYAKEADDAAVEIADLPNLTWDQWWAFIQKLRDDPSQSSELLSEAKKLNDSQAPK

SEQ ID NO: 543 - protein, 58 aa, ARTIFICIAL SEQUENCE
  Engineered IL-17A binding polypeptide
VDAKYAKEADEAAMEIADLPNLTWDQWEAFILKLRDDPSQSSELLSEAKKLNDSQAPK

SEQ ID NO: 544 - protein, 58 aa, ARTIFICIAL SEQUENCE
  Engineered IL-17A binding polypeptide
VDAKYAKEADEAAVEIADLPNLTWDQWYAFITKLRDDPSQSSELLSEAKKLNDSQAPK

SEQ ID NO: 545 - protein, 58 aa, ARTIFICIAL SEQUENCE
  Engineered IL-17A binding polypeptide
VDAKYAKEADEAAYEIASLPNLTWDQWFAFIEKLRDDPSQSSELLSEAKKLNDSQAPK

SEQ ID NO: 546 - protein, 58 aa, ARTIFICIAL SEQUENCE
  Engineered IL-17A binding polypeptide
VDAKYAKEADDAAVEIANLPNLTWDQWFAFIDKLRDDPSQSSELLSEAKKLNDSQAPK

SEQ ID NO: 547 - protein, 58 aa, ARTIFICIAL SEQUENCE
  Engineered IL-17A binding polypeptide
VDAKYAKEADDAAYEIAYLPNLTWDQWFAFIQKLRDDPSQSSELLSEAKKLNDSQAPK

SEQ ID NO: 548 - protein, 58 aa, ARTIFICIAL SEQUENCE
  Engineered IL-17A binding polypeptide
VDAKYAKEADDAAVEIAALPNLTWDQWYAFIEKLRDDPSQSSELLSEAKKLNDSQAPK

SEQ ID NO: 549 - protein, 58 aa, ARTIFICIAL SEQUENCE
  Engineered IL-17A binding polypeptide
VDAKYAKEADNAAMEIAELPNLTWDQWYAFINKLRDDPSQSSELLSEAKKLNDSQAPK

SEQ ID NO: 550 - protein, 58 aa, ARTIFICIAL SEQUENCE
  Engineered IL-17A binding polypeptide
VDAKYAKEADEAAYEIAYLPNLTWDQWWAFIQKLRDDPSQSSELLSEAKKLNDSQAPK

SEQ ID NO: 551 - protein, 58 aa, ARTIFICIAL SEQUENCE
  Engineered IL-17A binding polypeptide
VDAKYAKEADDAAFEIALLPNLTWDQWHAFIGKLRDDPSQSSELLSEAKKLNDSQAPK

SEQ ID NO: 552 - protein, 58 aa, ARTIFICIAL SEQUENCE
  Engineered IL-17A binding polypeptide
VDAKYAKEADMAAVEIAGLPNLTWDQWYAFIGKLRDDPSQSSELLSEAKKLNDSQAPK

SEQ ID NO: 553 - protein, 58 aa, ARTIFICIAL SEQUENCE
  Engineered IL-17A binding polypeptide
VDAKYAKEADMAAVEIAELPNLTWDQWWAFIGKLRDDPSQSSELLSEAKKLNDSQAPK

SEQ ID NO: 554 - protein, 58 aa, ARTIFICIAL SEQUENCE
  Engineered IL-17A binding polypeptide
VDAKYAKEADDAAVEIAGLPNLTWDQWFAFIDKLRDDPSQSSELLSEAKKLNDSQAPK

SEQ ID NO: 555 - protein, 58 aa, ARTIFICIAL SEQUENCE
  Engineered IL-17A binding polypeptide
VDAKYAKEADAAAVEIADLPNLTWDQWWAFIQKLRDDPSQSSELLSEAKKLNDSQAPK

SEQ ID NO: 556 - protein, 58 aa, ARTIFICIAL SEQUENCE
  Engineered IL-17A binding polypeptide
VDAKYAKEADDAAVEIADLPNLTWDQWYAFIDKLRDDPSQSSELLSEAKKLNDSQAPK

SEQ ID NO: 557 - protein, 58 aa, ARTIFICIAL SEQUENCE
  Engineered IL-17A binding polypeptide
VDAKYAKEADDAAVEIAELPNLTWEQWFAFIGKLRDDPSQSSELLSEAKKLNDSQAPK

SEQ ID NO: 558 - protein, 58 aa, ARTIFICIAL SEQUENCE
  Engineered IL-17A binding polypeptide
VDAKYAKEADDAAVEIAELPNLTWEQWAAFISKLRDDPSQSSELLSEAKKLNDSQAPK

SEQ ID NO: 559 - protein, 58 aa, ARTIFICIAL SEQUENCE
  Engineered IL-17A binding polypeptide
VDAKYAKEADDAAIEIADLPNLTWDQWWAFINKLRDDPSQSSELLSEAKKLNDSQAPK

SEQ ID NO: 560 - protein, 58 aa, ARTIFICIAL SEQUENCE
  Engineered IL-17A binding polypeptide
VDAKYAKEADDAAFEIAMLPNLTWDQWEAFILKLRDDPSQSSELLSEAKKLNDSQAPK

SEQ ID NO: 561 - protein, 58 aa, ARTIFICIAL SEQUENCE
  Engineered IL-17A binding polypeptide
VDAKYAKEADDAAMEIADLPNLTWDQWEAFILKLRDDPSQSSELLSEAKKLNDSQAPK

SEQ ID NO: 562 - protein, 58 aa, ARTIFICIAL SEQUENCE
  Engineered IL-17A binding polypeptide
VDAKYAKEADEAAVEIAELPNLTWDQWAAFIDKLRDDPSQSSELLSEAKKLNDSQAPK

SEQ ID NO: 563 - protein, 58 aa, ARTIFICIAL SEQUENCE
  Engineered IL-17A binding polypeptide
VDAKYAKEADDAAFEIAELPNLTWDQWFAFINKLRDDPSQSSELLSEAKKLNDSQAPK

SEQ ID NO: 564 - protein, 58 aa, ARTIFICIAL SEQUENCE
  Engineered IL-17A binding polypeptide
VDAKYAKEADDAAVEIASLPNLTWDQWEAFILKLRDDPSQSSELLSEAKKLNDSQAPK

SEQ ID NO: 565 - protein, 58 aa, ARTIFICIAL SEQUENCE
  Engineered IL-17A binding polypeptide
VDAKYAKEADAAAYEIADLPNLTWDQWYAFIEKLRDDPSQSSELLSEAKKLNDSQAPK

SEQ ID NO: 566 - protein, 58 aa, ARTIFICIAL SEQUENCE
  Engineered IL-17A binding polypeptide
VDAKYAKEADEAAVEIAALPNLTWDQWWAFIMKLRDDPSQSSELLSEAKKLNDSQAPK

SEQ ID NO: 567 - protein, 58 aa, ARTIFICIAL SEQUENCE
  Engineered IL-17A binding polypeptide
VDAKYAKEADEAAVEIAFLPNLTWDQWFAFIDKLRDDPSQSSELLSEAKKLNDSQAPK

SEQ ID NO: 568 - protein, 58 aa, ARTIFICIAL SEQUENCE
  Engineered IL-17A binding polypeptide
VDAKYAKEADAAAYEIAFLPNLTWDQWFAFIEKLRDDPSQSSELLSEAKKLNDSQAPK

SEQ ID NO: 569 - protein, 58 aa, ARTIFICIAL SEQUENCE
  Engineered IL-17A binding polypeptide
VDAKYAKEADRAAFEIAELPNLTWDQWWAFIRKLRDDPSQSSELLSEAKKLNDSQAPK

SEQ ID NO: 570 - protein, 58 aa, ARTIFICIAL SEQUENCE
  Engineered IL-17A binding polypeptide
VDAKYAKEADDAAVEIAELPNLTWDQWMAFIHKLRDDPSQSSELLSEAKKLNDSQAPK

SEQ ID NO: 571 - protein, 58 aa, ARTIFICIAL SEQUENCE
  Engineered IL-17A binding polypeptide
VDAKYAKEADDAAVEIAYLPNLTWDQWFAFITKLRDDPSQSSELLSEAKKLNDSQAPK

SEQ ID NO: 572 - protein, 58 aa, ARTIFICIAL SEQUENCE
  Engineered IL-17A binding polypeptide
VDAKYAKEADDAAMEIADLPNLTWDQWYAFISKLRDDPSQSSELLSEAKKLNDSQAPK

SEQ ID NO: 573 - protein, 58 aa, ARTIFICIAL SEQUENCE
  Engineered IL-17A binding polypeptide
VDAKYAKEADDAAYEIAFLPNLTWEQWWAFISKLRDDPSQSSELLSEAKKLNDSQAPK

SEQ ID NO: 574 - protein, 58 aa, ARTIFICIAL SEQUENCE
  Engineered IL-17A binding polypeptide
VDAKYAKEADMAAYEIASLPNLTWDQWFAFISKLRDDPSQSSELLSEAKKLNDSQAPK

SEQ ID NO: 575 - protein, 58 aa, ARTIFICIAL SEQUENCE
  Engineered IL-17A binding polypeptide
VDAKYAKEADDAAFEIANLPNLTWDQWFAFINKLRDDPSQSSELLSEAKKLNDSQAPK

SEQ ID NO: 576 - protein, 58 aa, ARTIFICIAL SEQUENCE
  Engineered IL-17A binding polypeptide
VDAKYAKEADSAAMEIADLPNLTWDQWMAFIQKLRDDPSQSSELLSEAKKLNDSQAPK

SEQ ID NO: 577 - protein, 58 aa, ARTIFICIAL SEQUENCE
  Engineered IL-17A binding polypeptide
VDAKYAKEADMAAVEIASLPNLTWDQWHAFIMKLRDDPSQSSELLSEAKKLNDSQAPK

SEQ ID NO: 578 - protein, 58 aa, ARTIFICIAL SEQUENCE
  Engineered IL-17A binding polypeptide
VDAKYAKEADAAAVEIADLPNLTWDQWHAFITKLRDDPSQSSELLSEAKKLNDSQAPK

SEQ ID NO: 579 - protein, 58 aa, ARTIFICIAL SEQUENCE
  Engineered IL-17A binding polypeptide
VDAKYAKEADDAAVEIANLPNLTWAQWEAFIMKLRDDPSQSSELLSEAKKLNDSQAPK

SEQ ID NO: 580 - protein, 58 aa, ARTIFICIAL SEQUENCE
  Engineered IL-17A binding polypeptide
VDAKYAKEADIAAMEIADLPNLTWDQWWAFINKLRDDPSQSSELLSEAKKLNDSQAPK

SEQ ID NO: 581 - protein, 58 aa, ARTIFICIAL SEQUENCE
  Engineered IL-17A binding polypeptide
VDAKYAKEADHAAVEIAGLPNLTWDQWFAFINKLRDDPSQSSELLSEAKKLNDSQAPK

SEQ ID NO: 582 - protein, 58 aa, ARTIFICIAL SEQUENCE
  Engineered IL-17A binding polypeptide
VDAKYAKEADEAAYEIAELPNLTWDQWWAFIGKLRDDPSQSSELLSEAKKLNDSQAPK

SEQ ID NO: 583 - protein, 58 aa, ARTIFICIAL SEQUENCE
  Engineered IL-17A binding polypeptide
VDAKYAKEADEAAFEIAELPNLTWDQWFAFIGKLRDDPSQSSELLSEAKKLNDSQAPK

SEQ ID NO: 584 - protein, 58 aa, ARTIFICIAL SEQUENCE
  Engineered IL-17A binding polypeptide
VDAKYAKEADAAAVEIANLPNLTWDQWWAFIEKLRDDPSQSSELLSEAKKLNDSQAPK

SEQ ID NO: 585 - protein, 58 aa, ARTIFICIAL SEQUENCE
  Engineered IL-17A binding polypeptide
VDAKYAKEADDAAMEIAALPNLTWFQWWAFINKLRDDPSQSSELLSEAKKLNDSQAPK

SEQ ID NO: 586 - protein, 58 aa, ARTIFICIAL SEQUENCE
  Engineered IL-17A binding polypeptide
VDAKYAKEADDAAVEIAELPNLTWDQWFAFIGKLRDDPSQSSELLSEAKKLNDSQAPK

SEQ ID NO: 587 - protein, 58 aa, ARTIFICIAL SEQUENCE
  Engineered IL-17A binding polypeptide
VDAKYAKEADEAAFEIASLPNLTWEQWLAFIAKLRDDPSQSSELLSEAKKLNDSQAPK

SEQ ID NO: 588 - protein, 58 aa, ARTIFICIAL SEQUENCE
  Engineered IL-17A binding polypeptide
VDAKYAKEADDAAIEIAYLPNLTWDQWWAFITKLRDDPSQSSELLSEAKKLNDSQAPK

SEQ ID NO: 589 - protein, 58 aa, ARTIFICIAL SEQUENCE
  Engineered IL-17A binding polypeptide
VDAKYAKEADDAAVEIAFLPNLTWDQWYAFIDKLRDDPSQSSELLSEAKKLNDSQAPK

SEQ ID NO: 590 - protein, 58 aa, ARTIFICIAL SEQUENCE
  Engineered IL-17A binding polypeptide
VDAKYAKEADDAAYEIAQLPNLTWDQWAAFIQKLRDDPSQSSELLSEAKKLNDSQAPK

SEQ ID NO: 591 - protein, 58 aa, ARTIFICIAL SEQUENCE
  Engineered IL-17A binding polypeptide
VDAKYAKEADDAAVEIALLPNLTWDQWFAFIDKLRDDPSQSSELLSEAKKLNDSQAPK

SEQ ID NO: 592 - protein, 58 aa, ARTIFICIAL SEQUENCE
  Engineered IL-17A binding polypeptide
VDAKYAKEADEAAYEIAYLPNLTWEQWWAFIEKLRDDPSQSSELLSEAKKLNDSQAPK

SEQ ID NO: 593 - protein, 58 aa, ARTIFICIAL SEQUENCE
  Engineered IL-17A binding polypeptide
VDAKYAKEADEAAVEIALLPNLTWDQWFAFITKLRDDPSQSSELLSEAKKLNDSQAPK

SEQ ID NO: 594 - protein, 58 aa, ARTIFICIAL SEQUENCE
  Engineered IL-17A binding polypeptide
VDAKYAKEADAAAYEIADLPNLTWDQWMAFIEKLRDDPSQSSELLSEAKKLNDSQAPK

SEQ ID NO: 595 - protein, 58 aa, ARTIFICIAL SEQUENCE
  Engineered IL-17A binding polypeptide
VDAKYAKEADDAAYEIAFLPNLTWDQWEAFIDKLRDDPSQSSELLSEAKKLNDSQAPK

SEQ ID NO: 596 - protein, 58 aa, ARTIFICIAL SEQUENCE
  Engineered IL-17A binding polypeptide
VDAKYAKEADDAAMEIAELPNLTWDQWAAFIDKLRDDPSQSSELLSEAKKLNDSQAPK

SEQ ID NO: 597 - protein, 58 aa, ARTIFICIAL SEQUENCE
  Engineered IL-17A binding polypeptide
VDAKYAKEADNAAMEIAGLPNLTWDQWFAFIDKLRDDPSQSSELLSEAKKLNDSQAPK

SEQ ID NO: 598 - protein, 58 aa, ARTIFICIAL SEQUENCE
  Engineered IL-17A binding polypeptide
VDAKYAKEADDAAYEIAELPNLTWLQWEAFIAKLRDDPSQSSELLSEAKKLNDSQAPK

SEQ ID NO: 599 - protein, 58 aa, ARTIFICIAL SEQUENCE
  Engineered IL-17A binding polypeptide
VDAKYAKEADEAAYEIAMLPNLTWDQWWAFITKLRDDPSQSSELLSEAKKLNDSQAPK

SEQ ID NO: 600 - protein, 58 aa, ARTIFICIAL SEQUENCE
  Engineered IL-17A binding polypeptide
VDAKYAKEADEAAYEIAELPNLTWDQWWAFIQKLRDDPSQSSELLSEAKKLNDSQAPK

SEQ ID NO: 601 - protein, 58 aa, ARTIFICIAL SEQUENCE
  Engineered IL-17A binding polypeptide
VDAKYAKEADDAAYEIASLPNLTWDQWQAFIDKLRDDPSQSSELLSEAKKLNDSQAPK

SEQ ID NO: 602 - protein, 58 aa, ARTIFICIAL SEQUENCE
  Engineered IL-17A binding polypeptide
VDAKYAKEADDAAYEIAFLPNLTWDQWFAFITKLRDDPSQSSELLSEAKKLNDSQAPK

SEQ ID NO: 603 - protein, 58 aa, ARTIFICIAL SEQUENCE
  Engineered IL-17A binding polypeptide
VDAKYAKEADMAAFEIASLPNLTWAQWAAFIEKLRDDPSQSSELLSEAKKLNDSQAPK

SEQ ID NO: 604 - protein, 58 aa, ARTIFICIAL SEQUENCE
  Engineered IL-17A binding polypeptide
VDAKYAKEADNAAYEIAELPNLTWDQWYAFIMKLRDDPSQSSELLSEAKKLNDSQAPK

SEQ ID NO: 605 - protein, 58 aa, ARTIFICIAL SEQUENCE
  Engineered IL-17A binding polypeptide
VDAKYAKEADDAAVEIASLPNLTWVQWDAFIQKLRDDPSQSSELLSEAKKLNDSQAPK

SEQ ID NO: 606 - protein, 58 aa, ARTIFICIAL SEQUENCE
  Engineered IL-17A binding polypeptide
VDAKYAKEADDAAVEIAYLPNLTWDQWYAFISKLRDDPSQSSELLSEAKKLNDSQAPK

SEQ ID NO: 607 - protein, 58 aa, ARTIFICIAL SEQUENCE
  Engineered IL-17A binding polypeptide
VDAKYAKEADDAAFEIALLPNLTWDQWDAFISKLRDDPSQSSELLSEAKKLNDSQAPK

SEQ ID NO: 608 - protein, 58 aa, ARTIFICIAL SEQUENCE
  Engineered IL-17A binding polypeptide
VDAKYAKEADDAAVEIADLPNLTWDQWWAFIHKLRDDPSQSSELLSEAKKLNDSQAPK

SEQ ID NO: 609 - protein, 58 aa, ARTIFICIAL SEQUENCE
  Engineered IL-17A binding polypeptide
VDAKYAKEADDAAVEIADLPNLTWDQWEAFIAKLRDDPSQSSELLSEAKKLNDSQAPK

SEQ ID NO: 610 - protein, 58 aa, ARTIFICIAL SEQUENCE
  Engineered IL-17A binding polypeptide
VDAKYAKEADMAAIEIADLPNLTWDQWWAFITKLRDDPSQSSELLSEAKKLNDSQAPK

SEQ ID NO: 611 - protein, 58 aa, ARTIFICIAL SEQUENCE
  Engineered IL-17A binding polypeptide
VDAKYAKEADDAAVEIADLPNLTWDQWWAFIGKLRDDPSQSSELLSEAKKLNDSQAPK

SEQ ID NO: 612 - protein, 58 aa, ARTIFICIAL SEQUENCE
  Engineered IL-17A binding polypeptide
VDAKYAKEADDAAFEIAALPNLTWDQWYAFINKLRDDPSQSSELLSEAKKLNDSQAPK

SEQ ID NO: 613 - protein, 58 aa, ARTIFICIAL SEQUENCE
  Engineered IL-17A binding polypeptide
VDAKYAKEADDAAFEIASLPNLTWDQWYAFINKLRDDPSQSSELLSEAKKLNDSQAPK

SEQ ID NO: 614 - protein, 58 aa, ARTIFICIAL SEQUENCE
  Engineered IL-17A binding polypeptide
VDAKYAKEADAAAAEIADLPNLTWDQWWAFIHKLRDDPSQSSELLSEAKKLNDSQAPK

SEQ ID NO: 615 - protein, 58 aa, ARTIFICIAL SEQUENCE
  Engineered IL-17A binding polypeptide
VDAKYAKEADDAAYEIAFLPNLTWDQWWAFITKLRDDPSQSSELLSEAKKLNDSQAPK

SEQ ID NO: 616 - protein, 58 aa, ARTIFICIAL SEQUENCE
  Engineered IL-17A binding polypeptide
VDAKYAKEADDAAVEIANLPNLTWDQWFAFIQKLRDDPSQSSELLSEAKKLNDSQAPK

SEQ ID NO: 617 - protein, 58 aa, ARTIFICIAL SEQUENCE
  Engineered IL-17A binding polypeptide
VDAKYAKEADDAAVEIAALPNLTWDQWDAFIRKLRDDPSQSSELLSEAKKLNDSQAPK

SEQ ID NO: 618 - protein, 58 aa, ARTIFICIAL SEQUENCE
  Engineered IL-17A binding polypeptide
VDAKYAKEADIAAMEIAELPNLTWDQWWAFIGKLRDDPSQSSELLSEAKKLNDSQAPK

SEQ ID NO: 619 - protein, 58 aa, ARTIFICIAL SEQUENCE
  Engineered IL-17A binding polypeptide
VDAKYAKEADDAAMEIAILPNLTWDQWEAFIWKLRDDPSQSSELLSEAKKLNDSQAPK

SEQ ID NO: 620 - protein, 58 aa, ARTIFICIAL SEQUENCE
  Engineered IL-17A binding polypeptide
VDAKYAKEADSAAVEIADLPNLTWDQWYAFITKLRDDPSQSSELLSEAKKLNDSQAPK

SEQ ID NO: 621 - protein, 58 aa, ARTIFICIAL SEQUENCE
  Engineered IL-17A binding polypeptide
VDAKYAKEADEAAVEIADLPNLTWDQWFAFINKLRDDPSQSSELLSEAKKLNDSQAPK

SEQ ID NO: 622 - protein, 58 aa, ARTIFICIAL SEQUENCE
  Engineered IL-17A binding polypeptide
VDAKYAKEADAAAYEIAYLPNLTWDQWYAFISKLRDDPSQSSELLSEAKKLNDSQAPK

SEQ ID NO: 623 - protein, 58 aa, ARTIFICIAL SEQUENCE
  Engineered IL-17A binding polypeptide
VDAKYAKEADDAAYEIAALPNLTWDQWYAFITKLRDDPSQSSELLSEAKKLNDSQAPK

SEQ ID NO: 624 - protein, 58 aa, ARTIFICIAL SEQUENCE
  Engineered IL-17A binding polypeptide
VDAKYAKEADIAAVEIAELPNLTWDQWWAFIEKLRDDPSQSSELLSEAKKLNDSQAPK

SEQ ID NO: 625 - protein, 58 aa, ARTIFICIAL SEQUENCE
  Engineered IL-17A binding polypeptide
VDAKYAKEADRAAMEIAELPNLTWIQWEAFILKLRDDPSQSSELLSEAKKLNDSQAPK

SEQ ID NO: 626 - protein, 58 aa, ARTIFICIAL SEQUENCE
  Engineered IL-17A binding polypeptide
VDAKYAKEADDAAVEIANLPNLTWDQWEAFILKLRDDPSQSSELLSEAKKLNDSQAPK

SEQ ID NO: 627 - protein, 58 aa, ARTIFICIAL SEQUENCE
  Engineered IL-17A binding polypeptide
VDAKYAKEADEAAMEIAELPNLTWDQWWAFIDKLRDDPSQSSELLSEAKKLNDSQAPK

SEQ ID NO: 628 - protein, 58 aa, ARTIFICIAL SEQUENCE
  Engineered IL-17A binding polypeptide
VDAKYAKEADEAAVEIANLPNLTWDQWEAFILKLRDDPSQSSELLSEAKKLNDSQAPK

SEQ ID NO: 629 - protein, 58 aa, ARTIFICIAL SEQUENCE
  Engineered IL-17A binding polypeptide
VDAKYAKEADDAAMEIADLPNLTWDQWIAFIDKLRDDPSQSSELLSEAKKLNDSQAPK

SEQ ID NO: 630 - protein, 58 aa, ARTIFICIAL SEQUENCE
  Engineered IL-17A binding polypeptide
VDAKYAKEADDAAYEIAFLPNLTWDQWYAFINKLRDDPSQSSELLSEAKKLNDSQAPK

SEQ ID NO: 631 - protein, 58 aa, ARTIFICIAL SEQUENCE
  Engineered IL-17A binding polypeptide
VDAKYAKEADDAAVEIADLPNLTWEQWWAFINKLRDDPSQSSELLSEAKKLNDSQAPK

SEQ ID NO: 632 - protein, 58 aa, ARTIFICIAL SEQUENCE
  Engineered IL-17A binding polypeptide
VDAKYAKEADAAAVEIAELPNLTWDQWWAFIEKLRDDPSQSSELLSEAKKLNDSQAPK

SEQ ID NO: 633 - protein, 58 aa, ARTIFICIAL SEQUENCE
  Engineered IL-17A binding polypeptide
VDAKYAKEADEAAVEIAFLPNLTWDQWWAFINKLRDDPSQSSELLSEAKKLNDSQAPK

SEQ ID NO: 634 - protein, 58 aa, ARTIFICIAL SEQUENCE
  Engineered IL-17A binding polypeptide
VDAKYAKEADDAAYEIAELPNLTWDQWWAFINKLRDDPSQSSELLSEAKKLNDSQAPK

SEQ ID NO: 635 - protein, 58 aa, ARTIFICIAL SEQUENCE
  Engineered IL-17A binding polypeptide
VDAKYAKEADAAAYEIAGLPNLTWDQWFAFINKLRDDPSQSSELLSEAKKLNDSQAPK

SEQ ID NO: 636 - protein, 58 aa, ARTIFICIAL SEQUENCE
  Engineered IL-17A binding polypeptide
VDAKYAKEADDAAYEIAFLPNLTWDQWDAFIGKLRDDPSQSSELLSEAKKLNDSQAPK

SEQ ID NO: 637 - protein, 58 aa, ARTIFICIAL SEQUENCE
  Engineered IL-17A binding polypeptide
VDAKYAKEADDAAVEIAQLPNLTWDQWFAFINKLRDDPSQSSELLSEAKKLNDSQAPK

SEQ ID NO: 638 - protein, 58 aa, ARTIFICIAL SEQUENCE
  Engineered IL-17A binding polypeptide
VDAKYAKEADQAAYEIAFLPNLTWDQWEAFIFKLRDDPSQSSELLSEAKKLNDSQAPK

SEQ ID NO: 639 - protein, 58 aa, ARTIFICIAL SEQUENCE
  Engineered IL-17A binding polypeptide
VDAKYAKEADSAAVEIADLPNLTWAQWDAFISKLRDDPSQSSELLSEAKKLNDSQAPK

SEQ ID NO: 640 - protein, 58 aa, ARTIFICIAL SEQUENCE
  Engineered IL-17A binding polypeptide
VDAKYAKEADAAAMEIANLPNLTWDQWEAFIQKLRDDPSQSSELLSEAKKLNDSQAPK

SEQ ID NO: 641 - protein, 58 aa, ARTIFICIAL SEQUENCE
  Engineered IL-17A binding polypeptide
VDAKYAKEADGAALEIAELPNLTWDQWEAFIQKLRDDPSQSSELLSEAKKLNDSQAPK

SEQ ID NO: 642 - protein, 58 aa, ARTIFICIAL SEQUENCE
  Engineered IL-17A binding polypeptide
VDAKYAKEADEAAVEIADLPNLTWDQWYAFISKLRDDPSQSSELLSEAKKLNDSQAPK

SEQ ID NO: 643 - protein, 58 aa, ARTIFICIAL SEQUENCE
  Engineered IL-17A binding polypeptide
VDAKYAKEADDAAYEIAELPNLTWDQWFAFIHKLRDDPSQSSELLSEAKKLNDSQAPK

SEQ ID NO: 644 - protein, 58 aa, ARTIFICIAL SEQUENCE
  Engineered IL-17A binding polypeptide
VDAKYAKEADDAAFEIAALPNLTWEQWMAFIEKLRDDPSQSSELLSEAKKLNDSQAPK

SEQ ID NO: 645 - protein, 58 aa, ARTIFICIAL SEQUENCE
  Engineered IL-17A binding polypeptide
VDAKYAKEADDAAYEIAYLPNLTWDQWYAFIGKLRDDPSQSSELLSEAKKLNDSQAPK

SEQ ID NO: 646 - protein, 58 aa, ARTIFICIAL SEQUENCE
  Engineered IL-17A binding polypeptide
VDAKYAKEADQAAMEIADLPNLTWDQWAAFIMKLRDDPSQSSELLSEAKKLNDSQAPK

SEQ ID NO: 647 - protein, 58 aa, ARTIFICIAL SEQUENCE
  Engineered IL-17A binding polypeptide
VDAKYAKEADDAAYEIAYLPNLTWDQWWAFINKLRDDPSQSSELLSEAKKLNDSQAPK

SEQ ID NO: 648 - protein, 58 aa, ARTIFICIAL SEQUENCE
  Engineered IL-17A binding polypeptide
VDAKYAKEADDAAMEIASLPNLTWDQWWAFIAKLRDDPSQSSELLSEAKKLNDSQAPK

SEQ ID NO: 649 - protein, 58 aa, ARTIFICIAL SEQUENCE
  Engineered IL-17A binding polypeptide
VDAKYAKEADEAAVEIADLPNLTWEQWAAFINKLRDDPSQSSELLSEAKKLNDSQAPK

SEQ ID NO: 650 - protein, 58 aa, ARTIFICIAL SEQUENCE
  Engineered IL-17A binding polypeptide
VDAKYAKEADDAAVEIADLPNLTWDQWWAFINKLRDDPSQSSELLSEAKKLNDSQAPK

SEQ ID NO: 651 - protein, 58 aa, ARTIFICIAL SEQUENCE
  Engineered IL-17A binding polypeptide
VDAKYAKEADAAAVEIAELPNLTWDQWDAFITKLRDDPSQSSELLSEAKKLNDSQAPK

SEQ ID NO: 652 - protein, 58 aa, ARTIFICIAL SEQUENCE
  Engineered IL-17A binding polypeptide
VDAKYAKEADNAAMEIADLPNLTWDQWMAFIEKLRDDPSQSSELLSEAKKLNDSQAPK

SEQ ID NO: 653 - protein, 58 aa, ARTIFICIAL SEQUENCE
  Engineered IL-17A binding polypeptide
VDAKYAKEADHAAMEIAELPNLTWDQWWAFIDKLRDDPSQSSELLSEAKKLNDSQAPK

SEQ ID NO: 654 - protein, 58 aa, ARTIFICIAL SEQUENCE
  Engineered IL-17A binding polypeptide
VDAKYAKEADAAAYEIAALPNLTWDQWWAFITKLRDDPSQSSELLSEAKKLNDSQAPK

SEQ ID NO: 655 - protein, 58 aa, ARTIFICIAL SEQUENCE
  Engineered IL-17A binding polypeptide
VDAKYAKEADEAAFEIALLPNLTWDQWLAFIDKLRDDPSQSSELLSEAKKLNDSQAPK

SEQ ID NO: 656 - protein, 58 aa, ARTIFICIAL SEQUENCE
  Engineered IL-17A binding polypeptide
VDAKYAKEADDAALEIADLPNLTWDQWFAFIDKLRDDPSQSSELLSEAKKLNDSQAPK

SEQ ID NO: 657 - protein, 58 aa, ARTIFICIAL SEQUENCE
  Engineered IL-17A binding polypeptide
VDAKYAKEADKAAMEIADLPNLTWDQWEAFILKLRDDPSQSSELLSEAKKLNDSQAPK

SEQ ID NO: 658 - protein, 58 aa, ARTIFICIAL SEQUENCE
  Engineered IL-17A binding polypeptide
VDAKYAKEADDAAMEIADLPNLTWDQWWAFITKLRDDPSQSSELLSEAKKLNDSQAPK

SEQ ID NO: 659 - protein, 58 aa, ARTIFICIAL SEQUENCE
  Engineered IL-17A binding polypeptide
VDAKYAKEADNAAVEIAELPNLTWDQWFAFIGKLRDDPSQSSELLSEAKKLNDSQAPK

SEQ ID NO: 660 - protein, 58 aa, ARTIFICIAL SEQUENCE
  Engineered IL-17A binding polypeptide
VDAKYAKEADDAAIEIAELPNLTWDQWAAFIWKLRDDPSQSSELLSEAKKLNDSQAPK

SEQ ID NO: 661 - protein, 58 aa, ARTIFICIAL SEQUENCE
  Engineered IL-17A binding polypeptide
VDAKYAKEADQAAYEIAELPNLTWDQWFAFIGKLRDDPSQSSELLSEAKKLNDSQAPK

SEQ ID NO: 662 - protein, 58 aa, ARTIFICIAL SEQUENCE
  Engineered IL-17A binding polypeptide
VDAKYAKEADQAAVEIAGLPNLTWDQWWAFIDKLRDDPSQSSELLSEAKKLNDSQAPK

SEQ ID NO: 663 - protein, 58 aa, ARTIFICIAL SEQUENCE
  Engineered IL-17A binding polypeptide
VDAKYAKEADTAAYEIAMLPNLTWEQWWAFITKLRDDPSQSSELLSEAKKLNDSQAPK

SEQ ID NO: 664 - protein, 58 aa, ARTIFICIAL SEQUENCE
  Engineered IL-17A binding polypeptide
VDAKYAKEADNAAYEIAGLPNLTWDQWMAFINKLRDDPSQSSELLSEAKKLNDSQAPK

SEQ ID NO: 665 - protein, 58 aa, ARTIFICIAL SEQUENCE
  Engineered IL-17A binding polypeptide
VDAKYAKEADDAAVEIADLPNLTWDQWYAFIGKLRDDPSQSSELLSEAKKLNDSQAPK

SEQ ID NO: 666 - protein, 58 aa, ARTIFICIAL SEQUENCE
  Engineered IL-17A binding polypeptide
VDAKYAKEADEAAVEIADLPNLTWAQWWAFIEKLRDDPSQSSELLSEAKKLNDSQAPK

SEQ ID NO: 667 - protein, 58 aa, ARTIFICIAL SEQUENCE
  Engineered IL-17A binding polypeptide
VDAKYAKEADDAAVEIAYLPNLTWDQWYAFITKLRDDPSQSSELLSEAKKLNDSQAPK

SEQ ID NO: 668 - protein, 58 aa, ARTIFICIAL SEQUENCE
  Engineered IL-17A binding polypeptide
VDAKYAKEADKAAVEIAYLPNLTWDQWWAFIGKLRDDPSQSSELLSEAKKLNDSQAPK

SEQ ID NO: 669 - protein, 58 aa, ARTIFICIAL SEQUENCE
  Engineered IL-17A binding polypeptide
VDAKYAKEADDAAYEIADLPNLTWDQWMAFIDKLRDDPSQSSELLSEAKKLNDSQAPK

SEQ ID NO: 670 - protein, 58 aa, ARTIFICIAL SEQUENCE
  Engineered IL-17A binding polypeptide
VDAKYAKEADDAAVEIADLPNLTWDQWFAFIDKLRDDPSQSSELLSEAKKLNDSQAPK

SEQ ID NO: 671 - protein, 58 aa, ARTIFICIAL SEQUENCE
  Engineered IL-17A binding polypeptide
VDAKYAKEADDAAVEIADLPNLTWDQWAAFIEKLRDDPSQSSELLSEAKKLNDSQAPK

SEQ ID NO: 672 - protein, 58 aa, ARTIFICIAL SEQUENCE
  Engineered IL-17A binding polypeptide
VDAKYAKEADTAAMEIADLPNLTWDQWLAFITKLRDDPSQSSELLSEAKKLNDSQAPK

SEQ ID NO: 673 - protein, 58 aa, ARTIFICIAL SEQUENCE
  Engineered IL-17A binding polypeptide
VDAKYAKEADAAAVEIADLPNLTWDQWYAFIGKLRDDPSQSSELLSEAKKLNDSQAPK

SEQ ID NO: 674 - protein, 58 aa, ARTIFICIAL SEQUENCE
  Engineered IL-17A binding polypeptide
VDAKYAKEADDAAVEIAELPNLTWDQWFAFIDKLRDDPSQSSELLSEAKKLNDSQAPK

SEQ ID NO: 675 - protein, 58 aa, ARTIFICIAL SEQUENCE
  Engineered IL-17A binding polypeptide
VDAKYAKEADDAAVEIAALPNLTWDQWEAFIHKLRDDPSQSSELLSEAKKLNDSQAPK

SEQ ID NO: 676 - protein, 58 aa, ARTIFICIAL SEQUENCE
  Engineered IL-17A binding polypeptide
VDAKYAKEADDAAYEIAYLPNLTWDQWFAFIEKLRDDPSQSSELLSEAKKLNDSQAPK

SEQ ID NO: 677 - protein, 58 aa, ARTIFICIAL SEQUENCE
  Engineered IL-17A binding polypeptide
VDAKYAKEADQAAYEIADLPNLTWDQWFAFISKLRDDPSQSSELLSEAKKLNDSQAPK

SEQ ID NO: 678 - protein, 58 aa, ARTIFICIAL SEQUENCE
  Engineered IL-17A binding polypeptide
VDAKYAKEADEAAYEIAELPNLTWDQWWAFIHKLRDDPSQSSELLSEAKKLNDSQAPK

SEQ ID NO: 679 - protein, 58 aa, ARTIFICIAL SEQUENCE
  Engineered IL-17A binding polypeptide
VDAKYAKEADDAAYEIAFLPNLTWDQWHAFIDKLRDDPSQSSELLSEAKKLNDSQAPK

SEQ ID NO: 680 - protein, 58 aa, ARTIFICIAL SEQUENCE
  Engineered IL-17A binding polypeptide
VDAKYAKEADKAAVEIADLPNLTWDQWFAFIGKLRDDPSQSSELLSEAKKLNDSQAPK

SEQ ID NO: 681 - protein, 58 aa, ARTIFICIAL SEQUENCE
  Engineered IL-17A binding polypeptide
VDAKYAKEADDAAYEIAELPNLTWDQWWAFIQKLRDDPSQSSELLSEAKKLNDSQAPK

SEQ ID NO: 682 - protein, 58 aa, ARTIFICIAL SEQUENCE
  Engineered IL-17A binding polypeptide
VDAKYAKEADEAAVEIAELPNLTWDQWWAFIQKLRDDPSQSSELLSEAKKLNDSQAPK

SEQ ID NO: 683 - protein, 58 aa, ARTIFICIAL SEQUENCE
  Engineered IL-17A binding polypeptide
VDAKYAKEADDAAYEIAELPNLTWDQWFAFIDKLRDDPSQSSELLSEAKKLNDSQAPK

SEQ ID NO: 684 - protein, 58 aa, ARTIFICIAL SEQUENCE
  Engineered IL-17A binding polypeptide
VDAKYAKEADDAAVEIAGLPNLTWDQWAAFIDKLRDDPSQSSELLSEAKKLNDSQAPK

SEQ ID NO: 685 - protein, 58 aa, ARTIFICIAL SEQUENCE
  Engineered IL-17A binding polypeptide
VDAKYAKEADSAAVEIADLPNLTWDQWYAFIQKLRDDPSQSSELLSEAKKLNDSQAPK

SEQ ID NO: 686 - protein, 58 aa, ARTIFICIAL SEQUENCE
  Engineered IL-17A binding polypeptide
VDAKYAKEADEAAVEIADLPNLTWDQWFAFIDKLRDDPSQSSELLSEAKKLNDSQAPK

SEQ ID NO: 687 - protein, 58 aa, ARTIFICIAL SEQUENCE
  Engineered IL-17A binding polypeptide
VDAKYAKEADDAAMEIADLPNLTWDQWMAFIQKLRDDPSQSSELLSEAKKLNDSQAPK

SEQ ID NO: 688 - protein, 58 aa, ARTIFICIAL SEQUENCE
  Engineered IL-17A binding polypeptide
VDAKYAKEADDAAVEIALLPNLTWDQWWAFISKLRDDPSQSSELLSEAKKLNDSQAPK

SEQ ID NO: 689 - protein, 58 aa, ARTIFICIAL SEQUENCE
  Engineered IL-17A binding polypeptide
VDAKYAKEADDAAVEIADLPNLTWEQWFAFIEKLRDDPSQSSELLSEAKKLNDSQAPK

SEQ ID NO: 690 - protein, 58 aa, ARTIFICIAL SEQUENCE
  Engineered IL-17A binding polypeptide
VDAKYAKEADEAAVEIADLPNLTWDQWFAFISKLRDDPSQSSELLSEAKKLNDSQAPK

SEQ ID NO: 691 - protein, 58 aa, ARTIFICIAL SEQUENCE
  Engineered IL-17A binding polypeptide
VDAKYAKEADQAAVEIAELPNLTWDQWYAFIQKLRDDPSQSSELLSEAKKLNDSQAPK

SEQ ID NO: 692 - protein, 58 aa, ARTIFICIAL SEQUENCE
  Engineered IL-17A binding polypeptide
VDAKYAKEADEAAVEIAYLPNLTWDQWWAFIGKLRDDPSQSSELLSEAKKLNDSQAPK

SEQ ID NO: 693 - protein, 58 aa, ARTIFICIAL SEQUENCE
  Engineered IL-17A binding polypeptide
VDAKYAKEADDAAMEIADLPNLTWDQWAAFIKKLRDDPSQSSELLSEAKKLNDSQAPK

SEQ ID NO: 694 - protein, 58 aa, ARTIFICIAL SEQUENCE
  Engineered IL-17A binding polypeptide
VDAKYAKEADDAAFEIALLPNLTWVQWEAFIEKLRDDPSQSSELLSEAKKLNDSQAPK

SEQ ID NO: 695 - protein, 58 aa, ARTIFICIAL SEQUENCE
  Engineered IL-17A binding polypeptide
VDAKYAKEADDAAYEIAQLPNLTWDQWYAFIDKLRDDPSQSSELLSEAKKLNDSQAPK

SEQ ID NO: 696 - protein, 58 aa, ARTIFICIAL SEQUENCE
  Engineered IL-17A binding polypeptide
VDAKYAKEADMAAVEIADLPNLTWDQWHAFISKLRDDPSQSSELLSEAKKLNDSQAPK

SEQ ID NO: 697 - protein, 58 aa, ARTIFICIAL SEQUENCE
  Engineered IL-17A binding polypeptide
VDAKYAKEADDAAFEIAQLPNLTWDQWFAFINKLRDDPSQSSELLSEAKKLNDSQAPK

SEQ ID NO: 698 - protein, 58 aa, ARTIFICIAL SEQUENCE
  Engineered IL-17A binding polypeptide
VDAKYAKEADDAAVEIAELPNLTWDQWYAFISKLRDDPSQSSELLSEAKKLNDSQAPK

SEQ ID NO: 699 - protein, 58 aa, ARTIFICIAL SEQUENCE
  Engineered IL-17A binding polypeptide
VDAKYAKEADDAAYEIAYLPNLTWAQWYAFISKLRDDPSQSSELLSEAKKLNDSQAPK

SEQ ID NO: 700 - protein, 58 aa, ARTIFICIAL SEQUENCE
  Engineered IL-17A binding polypeptide
VDAKYAKEADDAAMEIANLPNLTWDQWYAFINKLRDDPSQSSELLSEAKKLNDSQAPK

SEQ ID NO: 701 - protein, 58 aa, ARTIFICIAL SEQUENCE
  Engineered IL-17A binding polypeptide
VDAKYAKEADEAAYEIAMLPNLTWDQWDAFIGKLRDDPSQSSELLSEAKKLNDSQAPK

SEQ ID NO: 702 - protein, 58 aa, ARTIFICIAL SEQUENCE
  Engineered IL-17A binding polypeptide
VDAKYAKEADEAAFEIAQLPNLTWDQWFAFIDKLRDDPSQSSELLSEAKKLNDSQAPK

SEQ ID NO: 703 - protein, 58 aa, ARTIFICIAL SEQUENCE
  Engineered IL-17A binding polypeptide
VDAKYAKEADDAAVEIAELPNLTWDQWYAFINKLRDDPSQSSELLSEAKKLNDSQAPK

SEQ ID NO: 704 - protein, 58 aa, ARTIFICIAL SEQUENCE
  Engineered IL-17A binding polypeptide
VDAKYAKEADNAAFEIAGLPNLTWDQWDAFIQKLRDDPSQSSELLSEAKKLNDSQAPK

SEQ ID NO: 705 - protein, 58 aa, ARTIFICIAL SEQUENCE
  Engineered IL-17A binding polypeptide
VDAKYAKEADMAAVEIAALPNLTWDQWWAFINKLRDDPSQSSELLSEAKKLNDSQAPK

SEQ ID NO: 706 - protein, 58 aa, ARTIFICIAL SEQUENCE
  Engineered IL-17A binding polypeptide
VDAKYAKEADDAAFEIAFLPNLTWDQWWAFIQKLRDDPSQSSELLSEAKKLNDSQAPK

SEQ ID NO: 707 - protein, 58 aa, ARTIFICIAL SEQUENCE
  Engineered IL-17A binding polypeptide
VDAKYAKEADKAAVEIADLPNLTWDQWWAFINKLRDDPSQSSELLSEAKKLNDSQAPK

SEQ ID NO: 708 - protein, 58 aa, ARTIFICIAL SEQUENCE
  Engineered IL-17A binding polypeptide
VDAKYAKEADSAAVEIADLPNLTWDQWWAFIEKLRDDPSQSSELLSEAKKLNDSQAPK

SEQ ID NO: 709 - protein, 58 aa, ARTIFICIAL SEQUENCE
  Engineered IL-17A binding polypeptide
VDAKYAKEADDAAMEIAALPNLTWDQWFAFIQKLRDDPSQSSELLSEAKKLNDSQAPK

SEQ ID NO: 710 - protein, 58 aa, ARTIFICIAL SEQUENCE
  Engineered IL-17A binding polypeptide
VDAKYAKEADDAAFEIAQLPNLTWDQWWAFINKLRDDPSQSSELLSEAKKLNDSQAPK

SEQ ID NO: 711 - protein, 58 aa, ARTIFICIAL SEQUENCE
  Engineered IL-17A binding polypeptide
VDAKYAKEADQAAVEIASLPNLTWEQWYAFIAKLRDDPSQSSELLSEAKKLNDSQAPK

SEQ ID NO: 712 - protein, 58 aa, ARTIFICIAL SEQUENCE
  Engineered IL-17A binding polypeptide
VDAKYAKEADEAAYEIAELPNLTWDQWFAFINKLRDDPSQSSELLSEAKKLNDSQAPK

SEQ ID NO: 713 - protein, 58 aa, ARTIFICIAL SEQUENCE
  Engineered IL-17A binding polypeptide
VDAKYAKEADMAAVEIADLPNLTWDQWYAFIEKLRDDPSQSSELLSEAKKLNDSQAPK

SEQ ID NO: 714 - protein, 58 aa, ARTIFICIAL SEQUENCE
  Engineered IL-17A binding polypeptide
VDAKYAKEADDAAVEIADLPNLTWWQWFAFIEKLRDDPSQSSELLSEAKKLNDSQAPK

SEQ ID NO: 715 - protein, 58 aa, ARTIFICIAL SEQUENCE
  Engineered IL-17A binding polypeptide
VDAKYAKEADDAAYEIAGLPNLTWDQWYAFIDKLRDDPSQSSELLSEAKKLNDSQAPK

SEQ ID NO: 716 - protein, 58 aa, ARTIFICIAL SEQUENCE
  Engineered IL-17A binding polypeptide
VDAKYAKEADEAAVEIADLPNLTWEQWWAFIEKLRDDPSQSSELLSEAKKLNDSQAPK

SEQ ID NO: 717 - protein, 58 aa, ARTIFICIAL SEQUENCE
  Engineered IL-17A binding polypeptide
VDAKYAKEADDAAVEIADLPNLTWDQWWAFITKLRDDPSQSSELLSEAKKLNDSQAPK

SEQ ID NO: 718 - protein, 58 aa, ARTIFICIAL SEQUENCE
  Engineered IL-17A binding polypeptide
VDAKYAKEADDAAVEIAELPNLTWDQWYAFIQKLRDDPSQSSELLSEAKKLNDSQAPK

SEQ ID NO: 719 - protein, 58 aa, ARTIFICIAL SEQUENCE
  Engineered IL-17A binding polypeptide
VDAKYAKEADQAAVEIADLPNLTWDQWYAFINKLRDDPSQSSELLSEAKKLNDSQAPK

SEQ ID NO: 720 - protein, 58 aa, ARTIFICIAL SEQUENCE
  Engineered IL-17A binding polypeptide
VDAKYAKEADKAAVEIAFLPNLTWDQWYAFIHKLRDDPSQSSELLSEAKKLNDSQAPK

SEQ ID NO: 721 - protein, 58 aa, ARTIFICIAL SEQUENCE
  Engineered IL-17A binding polypeptide
VDAKYAKEADNAAVEIAELPNLTWDQWEAFIAKLRDDPSQSSELLSEAKKLNDSQAPK

SEQ ID NO: 722 - protein, 58 aa, ARTIFICIAL SEQUENCE
  Engineered IL-17A binding polypeptide
VDAKYAKEADQAAFEIAELPNLTWDQWYAFIEKLRDDPSQSSELLSEAKKLNDSQAPK

SEQ ID NO: 723 - protein, 58 aa, ARTIFICIAL SEQUENCE
  Engineered IL-17A binding polypeptide
VDAKYAKEADDAAMEIANLPNLTWDQWEAFIQKLRDDPSQSSELLSEAKKLNDSQAPK

SEQ ID NO: 724 - protein, 58 aa, ARTIFICIAL SEQUENCE
  Engineered IL-17A binding polypeptide
VDAKYAKEADDAAVEIASLPNLTWDQWYAFINKLRDDPSQSSELLSEAKKLNDSQAPK

SEQ ID NO: 725 - protein, 58 aa, ARTIFICIAL SEQUENCE
  Engineered IL-17A binding polypeptide
VDAKYAKEADDAAYEIAFLPNLTWDQWWAFISKLRDDPSQSSELLSEAKKLNDSQAPK

SEQ ID NO: 726 - protein, 58 aa, ARTIFICIAL SEQUENCE
  Engineered IL-17A binding polypeptide
VDAKYAKEADDAAIEIAELPNLTWDQWWAFINKLRDDPSQSSELLSEAKKLNDSQAPK

SEQ ID NO: 727 - protein, 58 aa, ARTIFICIAL SEQUENCE
  Engineered IL-17A binding polypeptide
VDAKYAKEADDAAMEIADLPNLTWDQWWAFINKLRDDPSQSSELLSEAKKLNDSQAPK

SEQ ID NO: 728 - protein, 58 aa, ARTIFICIAL SEQUENCE
  Engineered IL-17A binding polypeptide
VDAKYAKEADDAAVEIAMLPNLTWDQWDAFIGKLRDDPSQSSELLSEAKKLNDSQAPK

SEQ ID NO: 729 - protein, 58 aa, ARTIFICIAL SEQUENCE
  Engineered IL-17A binding polypeptide
VDAKYAKEADDAAYEIAYLPNLTWDQWFAFINKLRDDPSQSSELLSEAKKLNDSQAPK

SEQ ID NO: 730 - protein, 58 aa, ARTIFICIAL SEQUENCE
  Engineered IL-17A binding polypeptide
VDAKYAKEADDAAVEIADLPNLTWDQWWAFISKLRDDPSQSSELLSEAKKLNDSQAPK

SEQ ID NO: 731 - protein, 58 aa, ARTIFICIAL SEQUENCE
  Engineered IL-17A binding polypeptide
VDAKYAKEADDAAVEIAQLPNLTWDQWFAFIYKLRDDPSQSSELLSEAKKLNDSQAPK

SEQ ID NO: 732 - protein, 58 aa, ARTIFICIAL SEQUENCE
  Engineered IL-17A binding polypeptide
VDAKYAKEADNAAVEIADLPNLTWDQWYAFIWKLRDDPSQSSELLSEAKKLNDSQAPK

SEQ ID NO: 733 - protein, 58 aa, ARTIFICIAL SEQUENCE
  Engineered IL-17A binding polypeptide
VDAKYAKEADEAAVEIAALPNLTWDQWEAFIKKLRDDPSQSSELLSEAKKLNDSQAPK

SEQ ID NO: 734 - protein, 58 aa, ARTIFICIAL SEQUENCE
  Engineered IL-17A binding polypeptide
VDAKYAKEADGAAVEIANLPNLTWDQWFAFINKLRDDPSQSSELLSEAKKLNDSQAPK

SEQ ID NO: 735 - protein, 58 aa, ARTIFICIAL SEQUENCE
  Engineered IL-17A binding polypeptide
VDAKYAKEADDAAFEIAELPNLTWDQWWAFISKLRDDPSQSSELLSEAKKLNDSQAPK

SEQ ID NO: 736 - protein, 58 aa, ARTIFICIAL SEQUENCE
  Engineered IL-17A binding polypeptide
VDAKYAKEADDAAVEIAQLPNLTWDQWFAFIDKLRDDPSQSSELLSEAKKLNDSQAPK

SEQ ID NO: 737 - protein, 58 aa, ARTIFICIAL SEQUENCE
  Engineered IL-17A binding polypeptide
VDAKYAKEADDAAMEIALLPNLTWDQWLAFIQKLRDDPSQSSELLSEAKKLNDSQAPK

SEQ ID NO: 738 - protein, 58 aa, ARTIFICIAL SEQUENCE
  Engineered IL-17A binding polypeptide
VDAKYAKEADDAAVEIADLPNLTWDQWEAFIQKLRDDPSQSSELLSEAKKLNDSQAPK

SEQ ID NO: 739 - protein, 58 aa, ARTIFICIAL SEQUENCE
  Engineered IL-17A binding polypeptide
VDAKYAKEADAAAVEIADLPNLTWEQWWAFIEKLRDDPSQSSELLSEAKKLNDSQAPK

SEQ ID NO: 740 - protein, 58 aa, ARTIFICIAL SEQUENCE
  Engineered IL-17A binding polypeptide
VDAKYAKEADEAAYEIAMLPNLTWDQWDAFIDKLRDDPSQSSELLSEAKKLNDSQAPK

SEQ ID NO: 741 - protein, 58 aa, ARTIFICIAL SEQUENCE
  Engineered IL-17A binding polypeptide
VDAKYAKEADLAAVEIAELPNLTWAQWFAFIEKLRDDPSQSSELLSEAKKLNDSQAPK

SEQ ID NO: 742 - protein, 58 aa, ARTIFICIAL SEQUENCE
  Engineered IL-17A binding polypeptide
VDAKYAKEADDAAYEIALLPNLTWDQWWAFIEKLRDDPSQSSELLSEAKKLNDSQAPK

SEQ ID NO: 743 - protein, 58 aa, ARTIFICIAL SEQUENCE
  Engineered IL-17A binding polypeptide
VDAKYAKEADQAAMEIAELPNLTWDQWEAFITKLRDDPSQSSELLSEAKKLNDSQAPK

SEQ ID NO: 744 - protein, 58 aa, ARTIFICIAL SEQUENCE
  Engineered IL-17A binding polypeptide
VDAKYAKEADDAAVEIAELPNLTWDQWEAFIMKLRDDPSQSSELLSEAKKLNDSQAPK

SEQ ID NO: 745 - protein, 58 aa, ARTIFICIAL SEQUENCE
  Engineered IL-17A binding polypeptide
VDAKYAKEADMAAVEIASLPNLTWDQWYAFIHKLRDDPSQSSELLSEAKKLNDSQAPK

SEQ ID NO: 746 - protein, 58 aa, ARTIFICIAL SEQUENCE
  Engineered IL-17A binding polypeptide
VDAKYAKEADNAAVEIADLPNLTWDQWWAFIEKLRDDPSQSSELLSEAKKLNDSQAPK

SEQ ID NO: 747 - protein, 58 aa, ARTIFICIAL SEQUENCE
  Engineered IL-17A binding polypeptide
VDAKYAKEADDAAYEIASLPNLTWDQWWAFIEKLRDDPSQSSELLSEAKKLNDSQAPK

SEQ ID NO: 748 - protein, 58 aa, ARTIFICIAL SEQUENCE
  Engineered IL-17A binding polypeptide
VDAKYAKEADAAAVEIADLPNLTWDQWYAFISKLRDDPSQSSELLSEAKKLNDSQAPK

SEQ ID NO: 749 - protein, 58 aa, ARTIFICIAL SEQUENCE
  Engineered IL-17A binding polypeptide
VDAKYAKEADDAAYEIALLPNLTWDQWDAFIMKLRDDPSQSSELLSEAKKLNDSQAPK

SEQ ID NO: 750 - protein, 58 aa, ARTIFICIAL SEQUENCE
  Engineered IL-17A binding polypeptide
VDAKYAKEADMAAVEIADLPNLTWDQWWAFIEKLRDDPSQSSELLSEAKKLNDSQAPK

SEQ ID NO: 751 - protein, 58 aa, ARTIFICIAL SEQUENCE
  Engineered IL-17A binding polypeptide
VDAKYAKEADDAAIEIAGLPNLTWDQWFAFISKLRDDPSQSSELLSEAKKLNDSQAPK

SEQ ID NO: 752 - protein, 58 aa, ARTIFICIAL SEQUENCE
  Engineered IL-17A binding polypeptide
VDAKYAKEADEAAYEIAFLPNLTWDQWFAFIEKLRDDPSQSSELLSEAKKLNDSQAPK

SEQ ID NO: 753 - protein, 58 aa, ARTIFICIAL SEQUENCE
  Engineered IL-17A binding polypeptide
VDAKYAKEADIAAVEIADLPNLTWDQWWAFIEKLRDDPSQSSELLSEAKKLNDSQAPK

SEQ ID NO: 754 - protein, 58 aa, ARTIFICIAL SEQUENCE
  Engineered IL-17A binding polypeptide
VDAKYAKEADDAAIEIAELPNLTWDQWYAFIEKLRDDPSQSSELLSEAKKLNDSQAPK

SEQ ID NO: 755 - protein, 58 aa, ARTIFICIAL SEQUENCE
  Engineered IL-17A binding polypeptide
VDAKYAKEADIAAMEIADLPNLTWDQWWAFIGKLRDDPSQSSELLSEAKKLNDSQAPK

SEQ ID NO: 756 - protein, 58 aa, ARTIFICIAL SEQUENCE
  Engineered IL-17A binding polypeptide
VDAKYAKEADNAAMEIADLPNLTWDQWYAFIDKLRDDPSQSSELLSEAKKLNDSQAPK

SEQ ID NO: 757 - protein, 58 aa, ARTIFICIAL SEQUENCE
  Engineered IL-17A binding polypeptide
VDAKYAKEADDAAYEIADLPNLTWLQWYAFIEKLRDDPSQSSELLSEAKKLNDSQAPK

SEQ ID NO: 758 - protein, 58 aa, ARTIFICIAL SEQUENCE
  Engineered IL-17A binding polypeptide
VDAKYAKEADEAAVEIASLPNLTWDQWWAFISKLRDDPSQSSELLSEAKKLNDSQAPK

SEQ ID NO: 759 - protein, 58 aa, ARTIFICIAL SEQUENCE
  Engineered IL-17A binding polypeptide
VDAKYAKEADAAAVEIADLPNLTWWQWEAFIDKLRDDPSQSSELLSEAKKLNDSQAPK

SEQ ID NO: 760 - protein, 58 aa, ARTIFICIAL SEQUENCE
  Engineered IL-17A binding polypeptide
VDAKYAKEADMAAVEIAELPNLTWDQWYAFIDKLRDDPSQSSELLSEAKKLNDSQAPK

SEQ ID NO: 761 - protein, 58 aa, ARTIFICIAL SEQUENCE
  Engineered IL-17A binding polypeptide
VDAKYAKEADEAAMEIADLPNLTWDQWWAFIEKLRDDPSQSSELLSEAKKLNDSQAPK

SEQ ID NO: 762 - protein, 58 aa, ARTIFICIAL SEQUENCE
  Engineered IL-17A binding polypeptide
VDAKYAKEADDAAFEIAQLPNLTWDQWFAFITKLRDDPSQSSELLSEAKKLNDSQAPK

SEQ ID NO: 763 - protein, 58 aa, ARTIFICIAL SEQUENCE
  Engineered IL-17A binding polypeptide
VDAKYAKEADDAAFEIASLPNLTWDQWWAFIEKLRDDPSQSSELLSEAKKLNDSQAPK

SEQ ID NO: 764 - protein, 58 aa, ARTIFICIAL SEQUENCE
  Engineered IL-17A binding polypeptide
VDAKYAKEADDAAVEIAILPNLTWDQWFAFIAKLRDDPSQSSELLSEAKKLNDSQAPK

SEQ ID NO: 765 - protein, 58 aa, ARTIFICIAL SEQUENCE
  Engineered IL-17A binding polypeptide
VDAKYAKEADLAAVEIAELPNLTWDQWEAFILKLRDDPSQSSELLSEAKKLNDSQAPK

SEQ ID NO: 766 - protein, 58 aa, ARTIFICIAL SEQUENCE
  Engineered IL-17A binding polypeptide
VDAKYAKEADLAAVEIADLPNLTWEQWFAFIQKLRDDPSQSSELLSEAKKLNDSQAPK

SEQ ID NO: 767 - protein, 58 aa, ARTIFICIAL SEQUENCE
  Engineered IL-17A binding polypeptide
VDAKYAKEADSAAYEIAFLPNLTWDQWYAFIQKLRDDPSQSSELLSEAKKLNDSQAPK

SEQ ID NO: 768 - protein, 58 aa, ARTIFICIAL SEQUENCE
  Engineered IL-17A binding polypeptide
VDAKYAKEADDAAMEIADLPNLTWDQWFAFIEKLRDDPSQSSELLSEAKKLNDSQAPK

SEQ ID NO: 769 - protein, 58 aa, ARTIFICIAL SEQUENCE
  Engineered IL-17A binding polypeptide
VDAKYAKEADNAAVEIADLPNLTWDQWFAFIQKLRDDPSQSSELLSEAKKLNDSQAPK

SEQ ID NO: 770 - protein, 58 aa, ARTIFICIAL SEQUENCE
  Engineered IL-17A binding polypeptide
VDAKYAKEADDAAFEIAMLPNLTWDQWWAFIDKLRDDPSQSSELLSEAKKLNDSQAPK

SEQ ID NO: 771 - protein, 58 aa, ARTIFICIAL SEQUENCE
  Engineered IL-17A binding polypeptide
VDAKYAKEADEAAVEIADLPNLTWEQWWAFIGKLRDDPSQSSELLSEAKKLNDSQAPK

SEQ ID NO: 772 - protein, 58 aa, ARTIFICIAL SEQUENCE
  Engineered IL-17A binding polypeptide
VDAKYAKEADSAAYEIAFLPNLTWDQWFAFISKLRDDPSQSSELLSEAKKLNDSQAPK

SEQ ID NO: 773 - protein, 58 aa, ARTIFICIAL SEQUENCE
  Engineered IL-17A binding polypeptide
VDAKYAKEADDAAYEIAFLPNLTWDQWFAFIEKLRDDPSQSSELLSEAKKLNDSQAPK

SEQ ID NO: 774 - protein, 58 aa, ARTIFICIAL SEQUENCE
  Engineered IL-17A binding polypeptide
VDAKYAKEADDAAYEIAFLPNLTWEQWHAFIEKLRDDPSQSSELLSEAKKLNDSQAPK

SEQ ID NO: 775 - protein, 58 aa, ARTIFICIAL SEQUENCE
  Engineered IL-17A binding polypeptide
VDAKYAKEADLAALEIAELPNLTWDQWDAFIWKLRDDPSQSSELLSEAKKLNDSQAPK

SEQ ID NO: 776 - protein, 58 aa, ARTIFICIAL SEQUENCE
  Engineered IL-17A binding polypeptide
VDAKYAKEADDAAYEIAFLPNLTWDQWFAFINKLRDDPSQSSELLSEAKKLNDSQAPK

SEQ ID NO: 777 - protein, 58 aa, ARTIFICIAL SEQUENCE
  Engineered IL-17A binding polypeptide
VDAKYAKEADDAAIEIAELPNLTWDQWFAFISKLRDDPSQSSELLSEAKKLNDSQAPK

SEQ ID NO: 778 - protein, 58 aa, ARTIFICIAL SEQUENCE
  Engineered IL-17A binding polypeptide
VDAKYAKEADDAAIEIAELPNLTWEQWWAFIDKLRDDPSQSSELLSEAKKLNDSQAPK

SEQ ID NO: 779 - protein, 58 aa, ARTIFICIAL SEQUENCE
  Engineered IL-17A binding polypeptide
VDAKYAKEADMAAMEIAELPNLTWDQWEAFIMKLRDDPSQSSELLSEAKKLNDSQAPK

SEQ ID NO: 780 - protein, 58 aa, ARTIFICIAL SEQUENCE
  Engineered IL-17A binding polypeptide
VDAKYAKEADDAAYEIAFLPNLTWDQWFAFIDKLRDDPSQSSELLSEAKKLNDSQAPK

SEQ ID NO: 781 - protein, 58 aa, ARTIFICIAL SEQUENCE
  Engineered IL-17A binding polypeptide
VDAKYAKEADDAAVEIADLPNLTWDQWEAFILKLRDDPSQSSELLSEAKKLNDSQAPK

SEQ ID NO: 782 - protein, 58 aa, ARTIFICIAL SEQUENCE
  Engineered IL-17A binding polypeptide
VDAKYAKEADDAAMEIADLPNLTWDQWWAFIGKLRDDPSQSSELLSEAKKLNDSQAPK

SEQ ID NO: 783 - protein, 58 aa, ARTIFICIAL SEQUENCE
  Engineered IL-17A binding polypeptide
VDAKYAKEADRAAMEIADLPNLTWDQWDAFITKLRDDPSQSSELLSEAKKLNDSQAPK

SEQ ID NO: 784 - protein, 58 aa, ARTIFICIAL SEQUENCE
  Engineered IL-17A binding polypeptide
VDAKYAKEADDAAYEIAFLPNLTWDQWWAFIEKLRDDPSQSSELLSEAKKLNDSQAPK

SEQ ID NO: 785 - protein, 58 aa, ARTIFICIAL SEQUENCE
  Engineered IL-17A binding polypeptide
VDAKYAKEADMAAVEIADLPNLTWDQWWAFIQKLRDDPSQSSELLSEAKKLNDSQAPK

SEQ ID NO: 786 - protein, 58 aa, ARTIFICIAL SEQUENCE
  Engineered IL-17A binding polypeptide
VDAKYAKEADDAAVEIANLPNLTWDQWWAFIGKLRDDPSQSSELLSEAKKLNDSQAPK

SEQ ID NO: 787 - protein, 58 aa, ARTIFICIAL SEQUENCE
  Engineered IL-17A binding polypeptide
VDAKYAKEADDAAFEIALLPNLTWDQWHAFILKLRDDPSQSSELLSEAKKLNDSQAPK

SEQ ID NO: 788 - protein, 58 aa, ARTIFICIAL SEQUENCE
  Engineered IL-17A binding polypeptide
VDAKYAKEADDAAVEIAELPNLTWVQWWAFIEKLRDDPSQSSELLSEAKKLNDSQAPK

SEQ ID NO: 789 - protein, 58 aa, ARTIFICIAL SEQUENCE
  Engineered IL-17A binding polypeptide
VDAKYAKEADEAALEIADLPNLTWDQWWAFIEKLRDDPSQSSELLSEAKKLNDSQAPK

SEQ ID NO: 790 - protein, 58 aa, ARTIFICIAL SEQUENCE
  Engineered IL-17A binding polypeptide
VDAKYAKEADDAAVEIADLPNLTWDQWWAFIDKLRDDPSQSSELLSEAKKLNDSQAPK

SEQ ID NO: 791 - protein, 58 aa, ARTIFICIAL SEQUENCE
  Engineered IL-17A binding polypeptide
VDAKYAKEADDAAAEIADLPNLTWDQWYAFIDKLRDDPSQSSELLSEAKKLNDSQAPK

SEQ ID NO: 792 - protein, 58 aa, ARTIFICIAL SEQUENCE
  Engineered IL-17A binding polypeptide
VDAKYAKEADDAAMEIADLPNLTWDQWWAFIEKLRDDPSQSSELLSEAKKLNDSQAPK

SEQ ID NO: 793 - protein, 58 aa, ARTIFICIAL SEQUENCE
  Engineered IL-17A binding polypeptide
VDAKYAKEADEAAYEIADLPNLTWDQWWAFITKLRDDPSQSSELLSEAKKLNDSQAPK

SEQ ID NO: 794 - protein, 58 aa, ARTIFICIAL SEQUENCE
  Engineered IL-17A binding polypeptide
VDAKYAKEADNAAYEIAFLPNLTWDQWDAFITKLRDDPSQSSELLSEAKKLNDSQAPK

SEQ ID NO: 795 - protein, 58 aa, ARTIFICIAL SEQUENCE
  Engineered IL-17A binding polypeptide
VDAKYAKEADAAAVEIADLPNLTWAQWWAFIEKLRDDPSQSSELLSEAKKLNDSQAPK

SEQ ID NO: 796 - protein, 58 aa, ARTIFICIAL SEQUENCE
  Engineered IL-17A binding polypeptide
VDAKYAKEADAAAYEIAFLPNLTWDQWWAFIGKLRDDPSQSSELLSEAKKLNDSQAPK

SEQ ID NO: 797 - protein, 58 aa, ARTIFICIAL SEQUENCE
  Engineered IL-17A binding polypeptide
VDAKYAKEADAAAVEIADLPNLTWEQWWAFITKLRDDPSQSSELLSEAKKLNDSQAPK

SEQ ID NO: 798 - protein, 58 aa, ARTIFICIAL SEQUENCE
  Engineered IL-17A binding polypeptide
VDAKYAKEADAAAYEIAALPNLTWDQWWAFIRKLRDDPSQSSELLSEAKKLNDSQAPK

SEQ ID NO: 799 - protein, 58 aa, ARTIFICIAL SEQUENCE
  Engineered IL-17A binding polypeptide
VDAKYAKEADNAAFEIAELPNLTWDQWYAFIDKLRDDPSQSSELLSEAKKLNDSQAPK

SEQ ID NO: 800 - protein, 58 aa, ARTIFICIAL SEQUENCE
  Engineered IL-17A binding polypeptide
VDAKYAKEADQAAMEIADLPNLTWDQWYAFIGKLRDDPSQSSELLSEAKKLNDSQAPK

SEQ ID NO: 801 - protein, 58 aa, ARTIFICIAL SEQUENCE
  Engineered IL-17A binding polypeptide
VDAKYAKEADQAAMEIAELPNLTWDQWDAFIQKLRDDPSQSSELLSEAKKLNDSQAPK

SEQ ID NO: 802 - protein, 58 aa, ARTIFICIAL SEQUENCE
  Engineered IL-17A binding polypeptide
VDAKYAKEADEAAFEIAELPNLTWDQWFAFINKLRDDPSQSSELLSEAKKLNDSQAPK

SEQ ID NO: 803 - protein, 58 aa, ARTIFICIAL SEQUENCE
  Engineered IL-17A binding polypeptide
VDAKYAKEADDAAVEIAFLPNLTWEQWFAFIAKLRDDPSQSSELLSEAKKLNDSQAPK

SEQ ID NO: 804 - protein, 58 aa, ARTIFICIAL SEQUENCE
  Engineered IL-17A binding polypeptide
VDAKYAKEADDAAVEIANLPNLTWDQWEAFIAKLRDDPSQSSELLSEAKKLNDSQAPK

SEQ ID NO: 805 - protein, 58 aa, ARTIFICIAL SEQUENCE
  Engineered IL-17A binding polypeptide
VDAKYAKEADMAAIEIADLPNLTWDQWWAFIEKLRDDPSQSSELLSEAKKLNDSQAPK

SEQ ID NO: 806 - protein, 58 aa, ARTIFICIAL SEQUENCE
  Engineered IL-17A binding polypeptide
VDAKYAKEADQAAYEIANLPNLTWDQWWAFITKLRDDPSQSSELLSEAKKLNDSQAPK

SEQ ID NO: 807 - protein, 58 aa, ARTIFICIAL SEQUENCE
  Engineered IL-17A binding polypeptide
VDAKYAKEADQAAMEIAYLPNLTWDQWYAFIEKLRDDPSQSSELLSEAKKLNDSQAPK

SEQ ID NO: 808 - protein, 58 aa, ARTIFICIAL SEQUENCE
  Engineered IL-17A binding polypeptide
VDAKYAKEADKAAVEIAELPNLTWDQWWAFIDKLRDDPSQSSELLSEAKKLNDSQAPK

SEQ ID NO: 809 - protein, 58 aa, ARTIFICIAL SEQUENCE
  Engineered IL-17A binding polypeptide
VDAKYAKEADEAAVEIASLPNLTWDQWYAFIWKLRDDPSQSSELLSEAKKLNDSQAPK

SEQ ID NO: 810 - protein, 58 aa, ARTIFICIAL SEQUENCE
  Engineered IL-17A binding polypeptide
VDAKYAKEADMAAVEIADLPNLTWDQWWAFINKLRDDPSQSSELLSEAKKLNDSQAPK

SEQ ID NO: 811 - protein, 58 aa, ARTIFICIAL SEQUENCE
  Engineered IL-17A binding polypeptide
VDAKYAKEADAAAMEIAMLPNLTWDQWDAFISKLRDDPSQSSELLSEAKKLNDSQAPK

SEQ ID NO: 812 - protein, 58 aa, ARTIFICIAL SEQUENCE
  Engineered IL-17A binding polypeptide
VDAKYAKEADDAAYEIAFLPNLTWDQWDAFIQKLRDDPSQSSELLSEAKKLNDSQAPK

SEQ ID NO: 813 - protein, 58 aa, ARTIFICIAL SEQUENCE
  Engineered IL-17A binding polypeptide
VDAKYAKEADNAAYEIADLPNLTWDQWFAFIHKLRDDPSQSSELLSEAKKLNDSQAPK

SEQ ID NO: 814 - protein, 58 aa, ARTIFICIAL SEQUENCE
  Engineered IL-17A binding polypeptide
VDAKYAKEADDAAVEIAGLPNLTWDQWWAFIGKLRDDPSQSSELLSEAKKLNDSQAPK

SEQ ID NO: 815 - protein, 58 aa, ARTIFICIAL SEQUENCE
  Engineered IL-17A binding polypeptide
VDAKYAKEADDAAVEIAGLPNLTWDQWDAFILKLRDDPSQSSELLSEAKKLNDSQAPK

SEQ ID NO: 816 - protein, 58 aa, ARTIFICIAL SEQUENCE
  Engineered IL-17A binding polypeptide
VDAKYAKEADNAAMEIAELPNLTWDQWDAFIDKLRDDPSQSSELLSEAKKLNDSQAPK

SEQ ID NO: 817 - protein, 58 aa, ARTIFICIAL SEQUENCE
  Engineered IL-17A binding polypeptide
VDAKYAKEADMAAMEIASLPNLTWDQWFAFIDKLRDDPSQSSELLSEAKKLNDSQAPK

SEQ ID NO: 818 - protein, 58 aa, ARTIFICIAL SEQUENCE
  Engineered IL-17A binding polypeptide
VDAKYAKEADHAAVEIAALPNLTWDQWDAFIRKLRDDPSQSSELLSEAKKLNDSQAPK

SEQ ID NO: 819 - protein, 58 aa, ARTIFICIAL SEQUENCE
  Engineered IL-17A binding polypeptide
VDAKYAKEADEAAMEIADLPNLTWDQWYAFINKLRDDPSQSSELLSEAKKLNDSQAPK

SEQ ID NO: 820 - protein, 58 aa, ARTIFICIAL SEQUENCE
  Engineered IL-17A binding polypeptide
VDAKYAKEADNAAVEIADLPNLTWDQWFAFIEKLRDDPSQSSELLSEAKKLNDSQAPK

SEQ ID NO: 821 - protein, 58 aa, ARTIFICIAL SEQUENCE
  Engineered IL-17A binding polypeptide
VDAKYAKEADDAAVEIAELPNLTWDQWDAFIAKLRDDPSQSSELLSEAKKLNDSQAPK

SEQ ID NO: 822 - protein, 58 aa, ARTIFICIAL SEQUENCE
  Engineered IL-17A binding polypeptide
VDAKYAKEADDAAVEIALLPNLTWDQWWAFIEKLRDDPSQSSELLSEAKKLNDSQAPK

SEQ ID NO: 823 - protein, 58 aa, ARTIFICIAL SEQUENCE
  Engineered IL-17A binding polypeptide
VDAKYAKEADKAAVEIAYLPNLTWDQWYAFIRKLRDDPSQSSELLSEAKKLNDSQAPK

SEQ ID NO: 824 - protein, 58 aa, ARTIFICIAL SEQUENCE
  Engineered IL-17A binding polypeptide
VDAKYAKEADNAAFEIAELPNLTWDQWYAFIHKLRDDPSQSSELLSEAKKLNDSQAPK

SEQ ID NO: 825 - protein, 58 aa, ARTIFICIAL SEQUENCE
  Engineered IL-17A binding polypeptide
VDAKYAKEADAAAYEIAFLPNLTWDQWAAFIHKLRDDPSQSSELLSEAKKLNDSQAPK

SEQ ID NO: 826 - protein, 58 aa, ARTIFICIAL SEQUENCE
  Engineered IL-17A binding polypeptide
VDAKYAKEADQAAVEIADLPNLTWDQWDAFIDKLRDDPSQSSELLSEAKKLNDSQAPK

SEQ ID NO: 827 - protein, 58 aa, ARTIFICIAL SEQUENCE
  Engineered IL-17A binding polypeptide
VDAKYAKEADDAAVEIAALPNLTWDQWWAFIQKLRDDPSQSSELLSEAKKLNDSQAPK

SEQ ID NO: 828 - protein, 58 aa, ARTIFICIAL SEQUENCE
  Engineered IL-17A binding polypeptide
VDAKYAKEADEAAYEIADLPNLTWDQWWAFIHKLRDDPSQSSELLSEAKKLNDSQAPK

SEQ ID NO: 829 - protein, 58 aa, ARTIFICIAL SEQUENCE
  Engineered IL-17A binding polypeptide
VDAKYAKEADFAAVEIASLPNLTWDQWAAFIQKLRDDPSQSSELLSEAKKLNDSQAPK

SEQ ID NO: 830 - protein, 58 aa, ARTIFICIAL SEQUENCE
  Engineered IL-17A binding polypeptide
VDAKYAKEADEAAVEIAELPNLTWDQWFAFIDKLRDDPSQSSELLSEAKKLNDSQAPK

SEQ ID NO: 831 - protein, 58 aa, ARTIFICIAL SEQUENCE
  Engineered IL-17A binding polypeptide
VDAKYAKEADMAAYEIAELPNLTWDQWQAFITKLRDDPSQSSELLSEAKKLNDSQAPK

SEQ ID NO: 832 - protein, 58 aa, ARTIFICIAL SEQUENCE
  Engineered IL-17A binding polypeptide
VDAKYAKEADDAAMEIADLPNLTWWQWYAFIGKLRDDPSQSSELLSEAKKLNDSQAPK

SEQ ID NO: 833 - protein, 58 aa, ARTIFICIAL SEQUENCE
  Engineered IL-17A binding polypeptide
VDAKYAKEADDAAVEIAALPNLTWDQWFAFIGKLRDDPSQSSELLSEAKKLNDSQAPK

SEQ ID NO: 834 - protein, 58 aa, ARTIFICIAL SEQUENCE
  Engineered IL-17A binding polypeptide
VDAKYAKEADSAAYEIAFLPNLTWDQWYAFILKLRDDPSQSSELLSEAKKLNDSQAPK

SEQ ID NO: 835 - protein, 58 aa, ARTIFICIAL SEQUENCE
  Engineered IL-17A binding polypeptide
VDAKYAKEADAAAYEIAFLPNLTWDQWYAFIWKLRDDPSQSSELLSEAKKLNDSQAPK

SEQ ID NO: 836 - protein, 58 aa, ARTIFICIAL SEQUENCE
  Engineered IL-17A binding polypeptide
VDAKYAKEADQAAFEIAELPNLTWDQWYAFITKLRDDPSQSSELLSEAKKLNDSQAPK

SEQ ID NO: 837 - protein, 58 aa, ARTIFICIAL SEQUENCE
  Engineered IL-17A binding polypeptide
VDAKYAKEADEAAVEIANLPNLTWDQWEAFIRKLRDDPSQSSELLSEAKKLNDSQAPK

SEQ ID NO: 838 - protein, 58 aa, ARTIFICIAL SEQUENCE
  Engineered IL-17A binding polypeptide
VDAKYAKEADMAAYEIAGLPNLTWDQWYAFIDKLRDDPSQSSELLSEAKKLNDSQAPK

SEQ ID NO: 839 - protein, 58 aa, ARTIFICIAL SEQUENCE
  Engineered IL-17A binding polypeptide
VDAKYAKEADAAAFEIADLPNLTWDQWWAFINKLRDDPSQSSELLSEAKKLNDSQAPK

SEQ ID NO: 840 - protein, 58 aa, ARTIFICIAL SEQUENCE
  Engineered IL-17A binding polypeptide
VDAKYAKEADIAAMEIADLPNLTWDQWFAFINKLRDDPSQSSELLSEAKKLNDSQAPK

SEQ ID NO: 841 - protein, 58 aa, ARTIFICIAL SEQUENCE
  Engineered IL-17A binding polypeptide
VDAKYAKEADEAAVEIAELPNLTWDQWFAFISKLRDDPSQSSELLSEAKKLNDSQAPK

SEQ ID NO: 842 - protein, 58 aa, ARTIFICIAL SEQUENCE
  Engineered IL-17A binding polypeptide
VDAKYAKEADLAAVEIADLPNLTWDQWWAFISKLRDDPSQSSELLSEAKKLNDSQAPK

SEQ ID NO: 843 - protein, 58 aa, ARTIFICIAL SEQUENCE
  Engineered IL-17A binding polypeptide
VDAKYAKEADDAAFEIASLPNLTWDQWLAFIGKLRDDPSQSSELLSEAKKLNDSQAPK

SEQ ID NO: 844 - protein, 58 aa, ARTIFICIAL SEQUENCE
  Engineered IL-17A binding polypeptide
VDAKYAKEADMAAVEIADLPNLTWDQWFAFIGKLRDDPSQSSELLSEAKKLNDSQAPK

SEQ ID NO: 845 - protein, 58 aa, ARTIFICIAL SEQUENCE
  Engineered IL-17A binding polypeptide
VDAKYAKEADDAAVEIAYLPNLTWDQWYAFIRKLRDDPSQSSELLSEAKKLNDSQAPK

SEQ ID NO: 846 - protein, 58 aa, ARTIFICIAL SEQUENCE
  Engineered IL-17A binding polypeptide
VDAKYAKEADRAAYEIAELPNLTWDQWDAFINKLRDDPSQSSELLSEAKKLNDSQAPK

SEQ ID NO: 847 - protein, 58 aa, ARTIFICIAL SEQUENCE
  Engineered IL-17A binding polypeptide
VDAKYAKEADEAAVEIAGLPNLTWDQWFAFINKLRDDPSQSSELLSEAKKLNDSQAPK

SEQ ID NO: 848 - protein, 58 aa, ARTIFICIAL SEQUENCE
  Engineered IL-17A binding polypeptide
VDAKYAKEADHAAMEIADLPNLTWEQWAAFIDKLRDDPSQSSELLSEAKKLNDSQAPK

SEQ ID NO: 849 - protein, 58 aa, ARTIFICIAL SEQUENCE
  Engineered IL-17A binding polypeptide
VDAKYAKEADIAALEIAGLPNLTWDQWFAFIDKLRDDPSQSSELLSEAKKLNDSQAPK

SEQ ID NO: 850 - protein, 58 aa, ARTIFICIAL SEQUENCE
  Engineered IL-17A binding polypeptide
VDAKYAKEADEAAYEIAFLPNLTWDQWFAFIGKLRDDPSQSSELLSEAKKLNDSQAPK

SEQ ID NO: 851 - protein, 58 aa, ARTIFICIAL SEQUENCE
  Engineered IL-17A binding polypeptide
VDAKYAKEADRAAVEIAALPNLTWDQWDAFIGKLRDDPSQSSELLSEAKKLNDSQAPK

SEQ ID NO: 852 - protein, 58 aa, ARTIFICIAL SEQUENCE
  Engineered IL-17A binding polypeptide
VDAKYAKEADEAAVEIAELPNLTWDQWLAFINKLRDDPSQSSELLSEAKKLNDSQAPK

SEQ ID NO: 853 - protein, 58 aa, ARTIFICIAL SEQUENCE
  Engineered IL-17A binding polypeptide
VDAKYAKEADDAAMEIADLPNLTWDQWAAFIGKLRDDPSQSSELLSEAKKLNDSQAPK

SEQ ID NO: 854 - protein, 58 aa, ARTIFICIAL SEQUENCE
  Engineered IL-17A binding polypeptide
VDAKYAKEADEAAYEIALLPNLTWDQWDAFIMKLRDDPSQSSELLSEAKKLNDSQAPK

SEQ ID NO: 855 - protein, 58 aa, ARTIFICIAL SEQUENCE
  Engineered IL-17A binding polypeptide
VDAKYAKEADSAAVEIASLPNLTWDQWLAFINKLRDDPSQSSELLSEAKKLNDSQAPK

SEQ ID NO: 856 - protein, 58 aa, ARTIFICIAL SEQUENCE
  Engineered IL-17A binding polypeptide
VDAKYAKEADEAAYEIAYLPNLTWDQWFAFINKLRDDPSQSSELLSEAKKLNDSQAPK

SEQ ID NO: 857 - protein, 58 aa, ARTIFICIAL SEQUENCE
  Engineered IL-17A binding polypeptide
VDAKYAKEADMAAYEIAFLPNLTWDQWFAFITKLRDDPSQSSELLSEAKKLNDSQAPK

SEQ ID NO: 858 - protein, 58 aa, ARTIFICIAL SEQUENCE
  Engineered IL-17A binding polypeptide
VDAKYAKEADAAAMEIADLPNLTWDQWWAFIMKLRDDPSQSSELLSEAKKLNDSQAPK

SEQ ID NO: 859 - protein, 58 aa, ARTIFICIAL SEQUENCE
  Engineered IL-17A binding polypeptide
VDAKYAKEADDAAYEIAFLPNLTWDQWLAFIEKLRDDPSQSSELLSEAKKLNDSQAPK

SEQ ID NO: 860 - protein, 58 aa, ARTIFICIAL SEQUENCE
  Engineered IL-17A binding polypeptide
VDAKYAKEADDAAVEIADLPNLTWDQWYAFINKLRDDPSQSSELLSEAKKLNDSQAPK

SEQ ID NO: 861 - protein, 58 aa, ARTIFICIAL SEQUENCE
  Engineered IL-17A binding polypeptide
VDAKYAKEADEAAMEIADLPNLTWDQWFAFIDKLRDDPSQSSELLSEAKKLNDSQAPK

SEQ ID NO: 862 - protein, 58 aa, ARTIFICIAL SEQUENCE
  Engineered IL-17A binding polypeptide
VDAKYAKEADNAAVEIAELPNLTWDQWDAFITKLRDDPSQSSELLSEAKKLNDSQAPK

SEQ ID NO: 863 - protein, 58 aa, ARTIFICIAL SEQUENCE
  Engineered IL-17A binding polypeptide
VDAKYAKEADDAAYEIAFLPNLTWDQWWAFILKLRDDPSQSSELLSEAKKLNDSQAPK

SEQ ID NO: 864 - protein, 58 aa, ARTIFICIAL SEQUENCE
  Engineered IL-17A binding polypeptide
VDAKYAKEADNAAIEIADLPNLTWDQWWAFISKLRDDPSQSSELLSEAKKLNDSQAPK

SEQ ID NO: 865 - protein, 58 aa, ARTIFICIAL SEQUENCE
  Engineered IL-17A binding polypeptide
VDAKYAKEADDAAYEIAELPNLTWDQWFAFIEKLRDDPSQSSELLSEAKKLNDSQAPK

SEQ ID NO: 866 - protein, 58 aa, ARTIFICIAL SEQUENCE
  Engineered IL-17A binding polypeptide
VDAKYAKEADGAAFEIAALPNLTWDQWWAFIQKLRDDPSQSSELLSEAKKLNDSQAPK

SEQ ID NO: 867 - protein, 58 aa, ARTIFICIAL SEQUENCE
  Engineered IL-17A binding polypeptide
VDAKYAKEADDAAFEIAQLPNLTWDQWAAFIDKLRDDPSQSSELLSEAKKLNDSQAPK

SEQ ID NO: 868 - protein, 58 aa, ARTIFICIAL SEQUENCE
  Engineered IL-17A binding polypeptide
VDAKYAKEADMAALEIADLPNLTWDQWYAFIEKLRDDPSQSSELLSEAKKLNDSQAPK

SEQ ID NO: 869 - protein, 58 aa, ARTIFICIAL SEQUENCE
  Engineered IL-17A binding polypeptide
VDAKYAKEADVAAVEIAGLPNLTWDQWWAFIEKLRDDPSQSSELLSEAKKLNDSQAPK

SEQ ID NO: 870 - protein, 58 aa, ARTIFICIAL SEQUENCE
  Engineered IL-17A binding polypeptide
VDAKYAKEADIAAVEIAALPNLTWDQWDAFIDKLRDDPSQSSELLSEAKKLNDSQAPK

SEQ ID NO: 871 - protein, 58 aa, ARTIFICIAL SEQUENCE
  Engineered IL-17A binding polypeptide
VDAKYAKEADDAALEIADLPNLTWDQWWAFIGKLRDDPSQSSELLSEAKKLNDSQAPK

SEQ ID NO: 872 - protein, 58 aa, ARTIFICIAL SEQUENCE
  Engineered IL-17A binding polypeptide
VDAKYAKEADDAAYEIADLPNLTWDQWWAFIDKLRDDPSQSSELLSEAKKLNDSQAPK

SEQ ID NO: 873 - protein, 58 aa, ARTIFICIAL SEQUENCE
  Engineered IL-17A binding polypeptide
VDAKYAKEADNAAFEIAGLPNLTWDQWWAFISKLRDDPSQSSELLSEAKKLNDSQAPK

SEQ ID NO: 874 - protein, 58 aa, ARTIFICIAL SEQUENCE
  Engineered IL-17A binding polypeptide
VDAKYAKEADQAAMEIALLPNLTWDQWEAFILKLRDDPSQSSELLSEAKKLNDSQAPK

SEQ ID NO: 875 - protein, 58 aa, ARTIFICIAL SEQUENCE
  Engineered IL-17A binding polypeptide
VDAKYAKEADDAAYEIALLPNLTWDQWWAFIGKLRDDPSQSSELLSEAKKLNDSQAPK

SEQ ID NO: 876 - protein, 58 aa, ARTIFICIAL SEQUENCE
  Engineered IL-17A binding polypeptide
VDAKYAKEADDAAFEIAELPNLTWDQWFAFIQKLRDDPSQSSELLSEAKKLNDSQAPK

SEQ ID NO: 877 - protein, 58 aa, ARTIFICIAL SEQUENCE
  Engineered IL-17A binding polypeptide
VDAKYAKEADEAAVEIADLPNLTWDQWFAFIEKLRDDPSQSSELLSEAKKLNDSQAPK

SEQ ID NO: 878 - protein, 58 aa, ARTIFICIAL SEQUENCE
  Engineered IL-17A binding polypeptide
VDAKYAKEADDAAVEIANLPNLTWDQWWAFINKLRDDPSQSSELLSEAKKLNDSQAPK

SEQ ID NO: 879 - protein, 58 aa, ARTIFICIAL SEQUENCE
  Engineered IL-17A binding polypeptide
VDAKYAKEADQAAVEIADLPNLTWDQWEAFISKLRDDPSQSSELLSEAKKLNDSQAPK

SEQ ID NO: 880 - protein, 58 aa, ARTIFICIAL SEQUENCE
  Engineered IL-17A binding polypeptide
VDAKYAKEADNAAFEIANLPNLTWMQWEAFIEKLRDDPSQSSELLSEAKKLNDSQAPK

SEQ ID NO: 881 - protein, 58 aa, ARTIFICIAL SEQUENCE
  Engineered IL-17A binding polypeptide
VDAKYAKEADAAAVEIADLPNLTWYQWWAFIEKLRDDPSQSSELLSEAKKLNDSQAPK

SEQ ID NO: 882 - protein, 58 aa, ARTIFICIAL SEQUENCE
  Engineered IL-17A binding polypeptide
VDAKYAKEADDAAVEIANLPNLTWDQWLAFITKLRDDPSQSSELLSEAKKLNDSQAPK

SEQ ID NO: 883 - protein, 58 aa, ARTIFICIAL SEQUENCE
  Engineered IL-17A binding polypeptide
VDAKYAKEADDAAYEIAALPNLTWDQWWAFIEKLRDDPSQSSELLSEAKKLNDSQAPK

SEQ ID NO: 884 - protein, 58 aa, ARTIFICIAL SEQUENCE
  Engineered IL-17A binding polypeptide
VDAKYAKEADKAAYEIAELPNLTWDQWFAFIAKLRDDPSQSSELLSEAKKLNDSQAPK

SEQ ID NO: 885 - protein, 58 aa, ARTIFICIAL SEQUENCE
  Engineered IL-17A binding polypeptide
VDAKYAKEADIAAVEIADLPNLTWDQWFAFIQKLRDDPSQSSELLSEAKKLNDSQAPK

SEQ ID NO: 886 - protein, 58 aa, ARTIFICIAL SEQUENCE
  Engineered IL-17A binding polypeptide
VDAKYAKEADDAAYEIAELPNLTWDQWMAFIDKLRDDPSQSSELLSEAKKLNDSQAPK

SEQ ID NO: 887 - protein, 58 aa, ARTIFICIAL SEQUENCE
  Engineered IL-17A binding polypeptide
VDAKYAKEADNAAVEIAALPNLTWDQWWAFIGKLRDDPSQSSELLSEAKKLNDSQAPK

SEQ ID NO: 888 - protein, 58 aa, ARTIFICIAL SEQUENCE
  Engineered IL-17A binding polypeptide
VDAKYAKEADDAAVEIAELPNLTWDQWWAFIAKLRDDPSQSSELLSEAKKLNDSQAPK

SEQ ID NO: 889 - protein, 58 aa, ARTIFICIAL SEQUENCE
  Engineered IL-17A binding polypeptide
VDAKYAKEADKAAYEIAFLPNLTWDQWWAFINKLRDDPSQSSELLSEAKKLNDSQAPK

SEQ ID NO: 890 - protein, 58 aa, ARTIFICIAL SEQUENCE
  Engineered IL-17A binding polypeptide
VDAKYAKEADDAAVEIAELPNLTWDQWFAFIEKLRDDPSQSSELLSEAKKLNDSQAPK

SEQ ID NO: 891 - protein, 58 aa, ARTIFICIAL SEQUENCE
  Engineered IL-17A binding polypeptide
VDAKYAKEADDAAMEIAYLPNLTWEQWFAFIEKLRDDPSQSSELLSEAKKLNDSQAPK

SEQ ID NO: 892 - protein, 58 aa, ARTIFICIAL SEQUENCE
  Engineered IL-17A binding polypeptide
VDAKYAKEADDAAFEIALLPNLTWDQWFAFIAKLRDDPSQSSELLSEAKKLNDSQAPK

SEQ ID NO: 893 - protein, 58 aa, ARTIFICIAL SEQUENCE
  Engineered IL-17A binding polypeptide
VDAKYAKEADDAAYEIAMLPNLTWDQWHAFIEKLRDDPSQSSELLSEAKKLNDSQAPK

SEQ ID NO: 894 - protein, 58 aa, ARTIFICIAL SEQUENCE
  Engineered IL-17A binding polypeptide
VDAKYAKEADDAAFEIAMLPNLTWDQWFAFIGKLRDDPSQSSELLSEAKKLNDSQAPK

SEQ ID NO: 895 - protein, 58 aa, ARTIFICIAL SEQUENCE
  Engineered IL-17A binding polypeptide
VDAKYAKEADEAAVEIAELPNLTWDQWYAFIDKLRDDPSQSSELLSEAKKLNDSQAPK

SEQ ID NO: 896 - protein, 58 aa, ARTIFICIAL SEQUENCE
  Engineered IL-17A binding polypeptide
VDAKYAKEADDAAFEIAMLPNLTWDQWFAFINKLRDDPSQSSELLSEAKKLNDSQAPK

SEQ ID NO: 897 - protein, 58 aa, ARTIFICIAL SEQUENCE
  Engineered IL-17A binding polypeptide
VDAKYAKEADTAAVEIAFLPNLTWDQWMAFIEKLRDDPSQSSELLSEAKKLNDSQAPK

SEQ ID NO: 898 - protein, 58 aa, ARTIFICIAL SEQUENCE
  Engineered IL-17A binding polypeptide
VDAKYAKEADLAAYEIAFLPNLTWDQWWAFINKLRDDPSQSSELLSEAKKLNDSQAPK

SEQ ID NO: 899 - protein, 58 aa, ARTIFICIAL SEQUENCE
  Engineered IL-17A binding polypeptide
VDAKYAKEADAAAYEIAYLPNLTWDQWWAFISKLRDDPSQSSELLSEAKKLNDSQAPK

SEQ ID NO: 900 - protein, 58 aa, ARTIFICIAL SEQUENCE
  Engineered IL-17A binding polypeptide
VDAKYAKEADDAAYEIAGLPNLTWDQWWAFIEKLRDDPSQSSELLSEAKKLNDSQAPK

SEQ ID NO: 901 - protein, 58 aa, ARTIFICIAL SEQUENCE
  Engineered IL-17A binding polypeptide
VDAKYAKEADNAAVEIAFLPNLTWDQWYAFIEKLRDDPSQSSELLSEAKKLNDSQAPK

SEQ ID NO: 902 - protein, 58 aa, ARTIFICIAL SEQUENCE
  Engineered IL-17A binding polypeptide
VDAKYAKEADDAAYEIAYLPNLTWDQWYAFINKLRDDPSQSSELLSEAKKLNDSQAPK

SEQ ID NO: 903 - protein, 58 aa, ARTIFICIAL SEQUENCE
  Engineered IL-17A binding polypeptide
VDAKYAKEADAAALEIADLPNLTWDQWWAFIEKLRDDPSQSSELLSEAKKLNDSQAPK

SEQ ID NO: 904 - protein, 58 aa, ARTIFICIAL SEQUENCE
  Engineered IL-17A binding polypeptide
VDAKYAKEADDAAVEIADLPNLTWWQWWAFIEKLRDDPSQSSELLSEAKKLNDSQAPK

SEQ ID NO: 905 - protein, 58 aa, ARTIFICIAL SEQUENCE
  Engineered IL-17A binding polypeptide
VDAKYAKEADDAAMEIAGLPNLTWDQWAAFIGKLRDDPSQSSELLSEAKKLNDSQAPK

SEQ ID NO: 906 - protein, 58 aa, ARTIFICIAL SEQUENCE
  Engineered IL-17A binding polypeptide
VDAKYAKEADSAAYEIAQLPNLTWVQWAAFIDKLRDDPSQSSELLSEAKKLNDSQAPK

SEQ ID NO: 907 - protein, 58 aa, ARTIFICIAL SEQUENCE
  Engineered IL-17A binding polypeptide
VDAKYAKEADDAAFEIAWLPNLTWDQWFAFISKLRDDPSQSSELLSEAKKLNDSQAPK

SEQ ID NO: 908 - protein, 58 aa, ARTIFICIAL SEQUENCE
  Engineered IL-17A binding polypeptide
VDAKYAKEADEAAVEIAMLPNLTWDQWYAFIEKLRDDPSQSSELLSEAKKLNDSQAPK

SEQ ID NO: 909 - protein, 58 aa, ARTIFICIAL SEQUENCE
  Engineered IL-17A binding polypeptide
VDAKYAKEADDAALEIASLPNLTWDQWLAFIDKLRDDPSQSSELLSEAKKLNDSQAPK

SEQ ID NO: 910 - protein, 58 aa, ARTIFICIAL SEQUENCE
  Engineered IL-17A binding polypeptide
VDAKYAKEADDAAVEIAYLPNLTWDQWFAFIEKLRDDPSQSSELLSEAKKLNDSQAPK

SEQ ID NO: 911 - protein, 58 aa, ARTIFICIAL SEQUENCE
  Engineered IL-17A binding polypeptide
VDAKYAKEADDAAVEIADLPNLTWDQWWAFIEKLRDDPSQSSELLSEAKKLNDSQAPK

SEQ ID NO: 912 - protein, 58 aa, ARTIFICIAL SEQUENCE
  Engineered IL-17A binding polypeptide
VDAKYAKEADAAAVEIAELPNLTWDQWWAFIQKLRDDPSQSSELLSEAKKLNDSQAPK

SEQ ID NO: 913 - protein, 58 aa, ARTIFICIAL SEQUENCE
  Engineered IL-17A binding polypeptide
VDAKYAKEADDAAYEIAFLPNLTWDQWYAFIEKLRDDPSQSSELLSEAKKLNDSQAPK

SEQ ID NO: 914 - protein, 58 aa, ARTIFICIAL SEQUENCE
  Engineered IL-17A binding polypeptide
VDAKYAKEADDAAAEIADLPNLTWDQWAAFIDKLRDDPSQSSELLSEAKKLNDSQAPK

SEQ ID NO: 915 - protein, 58 aa, ARTIFICIAL SEQUENCE
  Engineered IL-17A binding polypeptide
VDAKYAKEADDAAFEIAVLPNLTWEQWWAFISKLRDDPSQSSELLSEAKKLNDSQAPK

SEQ ID NO: 916 - protein, 58 aa, ARTIFICIAL SEQUENCE
  Engineered IL-17A binding polypeptide
VDAKYAKEADDAAMEIADLPNLTWDQWYAFIWKLRDDPSQSSELLSEAKKLNDSQAPK

SEQ ID NO: 917 - protein, 58 aa, ARTIFICIAL SEQUENCE
  Engineered IL-17A binding polypeptide
VDAKYAKEADNAAVEIADLPNLTWDQWLAFIQKLRDDPSQSSELLSEAKKLNDSQAPK

SEQ ID NO: 918 - protein, 58 aa, ARTIFICIAL SEQUENCE
  Engineered IL-17A binding polypeptide
VDAKYAKEADDAAVEIAFLPNLTWDQWYAFILKLRDDPSQSSELLSEAKKLNDSQAPK

SEQ ID NO: 919 - protein, 58 aa, ARTIFICIAL SEQUENCE
  Engineered IL-17A binding polypeptide
VDAKYAKEADLAAYEIAYLPNLTWDQWFAFIYKLRDDPSQSSELLSEAKKLNDSQAPK

SEQ ID NO: 920 - protein, 58 aa, ARTIFICIAL SEQUENCE
  Engineered IL-17A binding polypeptide
VDAKYAKEADKAAFEIAMLPNLTWDQWDAFIRKLRDDPSQSSELLSEAKKLNDSQAPK

SEQ ID NO: 921 - protein, 58 aa, ARTIFICIAL SEQUENCE
  Engineered IL-17A binding polypeptide
VDAKYAKEADDAAFEIAFLPNLTWDQWFAFINKLRDDPSQSSELLSEAKKLNDSQAPK

SEQ ID NO: 922 - protein, 58 aa, ARTIFICIAL SEQUENCE
  Engineered IL-17A binding polypeptide
VDAKYAKEADNAAVEIASLPNLTWDQWWAFIGKLRDDPSQSSELLSEAKKLNDSQAPK

SEQ ID NO: 923 - protein, 58 aa, ARTIFICIAL SEQUENCE
  Engineered IL-17A binding polypeptide
VDAKYAKEADDAAFEIAWLPNLTWDQWWAFIGKLRDDPSQSSELLSEAKKLNDSQAPK

SEQ ID NO: 924 - protein, 58 aa, ARTIFICIAL SEQUENCE
  Engineered IL-17A binding polypeptide
VDAKYAKEADDAAVEIAELPNLTWDQWFAFINKLRDDPSQSSELLSEAKKLNDSQAPK

SEQ ID NO: 925 - protein, 58 aa, ARTIFICIAL SEQUENCE
  Engineered IL-17A binding polypeptide
VDAKYAKEADDAAYEIAWLPNLTWDQWFAFIDKLRDDPSQSSELLSEAKKLNDSQAPK

SEQ ID NO: 926 - protein, 58 aa, ARTIFICIAL SEQUENCE
  Engineered IL-17A binding polypeptide
VDAKYAKEADDAAFEIALLPNLTWDQWFAFIWKLRDDPSQSSELLSEAKKLNDSQAPK

SEQ ID NO: 927 - protein, 58 aa, ARTIFICIAL SEQUENCE
  Engineered IL-17A binding polypeptide
VDAKYAKEADDAAFEIAALPNLTWDQWYAFILKLRDDPSQSSELLSEAKKLNDSQAPK

SEQ ID NO: 928 - protein, 58 aa, ARTIFICIAL SEQUENCE
  Engineered IL-17A binding polypeptide
VDAKYAKEADMAAVEIAYLPNLTWDQWWAFIQKLRDDPSQSSELLSEAKKLNDSQAPK

SEQ ID NO: 929 - protein, 58 aa, ARTIFICIAL SEQUENCE
  Engineered IL-17A binding polypeptide
VDAKYAKEADHAAMEIASLPNLTWDQWEAFIDKLRDDPSQSSELLSEAKKLNDSQAPK

SEQ ID NO: 930 - protein, 58 aa, ARTIFICIAL SEQUENCE
  Engineered IL-17A binding polypeptide
VDAKYAKEADHAAYEIAALPNLTWDQWYAFINKLRDDPSQSSELLSEAKKLNDSQAPK

SEQ ID NO: 931 - protein, 58 aa, ARTIFICIAL SEQUENCE
  Engineered IL-17A binding polypeptide
VDAKYAKEADEAAYEIADLPNLTWDQWYAFINKLRDDPSQSSELLSEAKKLNDSQAPK

SEQ ID NO: 932 - protein, 58 aa, ARTIFICIAL SEQUENCE
  Engineered IL-17A binding polypeptide
VDAKYAKEADDAAYEIAELPNLTWDQWFAFITKLRDDPSQSSELLSEAKKLNDSQAPK

SEQ ID NO: 933 - protein, 58 aa, ARTIFICIAL SEQUENCE
  Engineered IL-17A binding polypeptide
VDAKYAKEADNAAYEIAMLPNLTWDQWMAFIDKLRDDPSQSSELLSEAKKLNDSQAPK

SEQ ID NO: 934 - protein, 58 aa, ARTIFICIAL SEQUENCE
  Engineered IL-17A binding polypeptide
VDAKYAKEADQAAVEIAALPNLTWEQWWAFITKLRDDPSQSSELLSEAKKLNDSQAPK

SEQ ID NO: 935 - protein, 58 aa, ARTIFICIAL SEQUENCE
  Engineered IL-17A binding polypeptide
VDAKYAKEADIAAVEIAGLPNLTWDQWWAFIDKLRDDPSQSSELLSEAKKLNDSQAPK

SEQ ID NO: 936 - protein, 58 aa, ARTIFICIAL SEQUENCE
  Engineered IL-17A binding polypeptide
VDAKYAKEADDAAYEIAMLPNLTWDQWFAFIQKLRDDPSQSSELLSEAKKLNDSQAPK

SEQ ID NO: 937 - protein, 58 aa, ARTIFICIAL SEQUENCE
  Engineered IL-17A binding polypeptide
VDAKYAKEADEAAVEIANLPNLTWDQWDAFIWKLRDDPSQSSELLSEAKKLNDSQAPK

SEQ ID NO: 938 - protein, 58 aa, ARTIFICIAL SEQUENCE
  Engineered IL-17A binding polypeptide
VDAKYAKEADDAAMEIADLPNLTWDQWFAFITKLRDDPSQSSELLSEAKKLNDSQAPK

SEQ ID NO: 939 - protein, 58 aa, ARTIFICIAL SEQUENCE
  Engineered IL-17A binding polypeptide
VDAKYAKEADQAAFEIAALPNLTWDQWFAFIGKLRDDPSQSSELLSEAKKLNDSQAPK

SEQ ID NO: 940 - protein, 58 aa, ARTIFICIAL SEQUENCE
  Engineered IL-17A binding polypeptide
VDAKYAKEADRAAIEIADLPNLTWDQWWAFIEKLRDDPSQSSELLSEAKKLNDSQAPK

SEQ ID NO: 941 - protein, 58 aa, ARTIFICIAL SEQUENCE
  Engineered IL-17A binding polypeptide
VDAKYAKEADEAAVEIAYLPNLTWDQWFAFINKLRDDPSQSSELLSEAKKLNDSQAPK

SEQ ID NO: 942 - protein, 58 aa, ARTIFICIAL SEQUENCE
  Engineered IL-17A binding polypeptide
VDAKYAKEADSAAVEIAELPNLTWDQWFAFIEKLRDDPSQSSELLSEAKKLNDSQAPK

SEQ ID NO: 943 - protein, 58 aa, ARTIFICIAL SEQUENCE
  Engineered IL-17A binding polypeptide
VDAKYAKEADDAAVEIAELPNLTWDQWWAFIGKLRDDPSQSSELLSEAKKLNDSQAPK

SEQ ID NO: 944 - protein, 58 aa, ARTIFICIAL SEQUENCE
  Engineered IL-17A binding polypeptide
VDAKYAKEADAAAYEIAYLPNLTWDQWWAFINKLRDDPSQSSELLSEAKKLNDSQAPK

SEQ ID NO: 945 - protein, 58 aa, ARTIFICIAL SEQUENCE
  Engineered IL-17A binding polypeptide
VDAKYAKEADEAAFEIAHLPNLTWDQWFAFIQKLRDDPSQSSELLSEAKKLNDSQAPK

SEQ ID NO: 946 - protein, 58 aa, ARTIFICIAL SEQUENCE
  Engineered IL-17A binding polypeptide
VDAKYAKEADDAAYEIAFLPNLTWDQWEAFIHKLRDDPSQSSELLSEAKKLNDSQAPK

SEQ ID NO: 947 - protein, 58 aa, ARTIFICIAL SEQUENCE
  Engineered IL-17A binding polypeptide
VDAKYAKEADDAAFEIAYLPNLTWDQWFAFITKLRDDPSQSSELLSEAKKLNDSQAPK

SEQ ID NO: 948 - protein, 58 aa, ARTIFICIAL SEQUENCE
  Engineered IL-17A binding polypeptide
VDAKYAKEADDAAYEIADLPNLTWDQWFAFINKLRDDPSQSSELLSEAKKLNDSQAPK

SEQ ID NO: 949 - protein, 58 aa, ARTIFICIAL SEQUENCE
  Engineered IL-17A binding polypeptide
VDAKYAKEADSAAYEIAGLPNLTWDQWEAFIRKLRDDPSQSSELLSEAKKLNDSQAPK

SEQ ID NO: 950 - protein, 58 aa, ARTIFICIAL SEQUENCE
  Engineered IL-17A binding polypeptide
VDAKYAKEADEAAYEIASLPNLTWDQWHAFIQKLRDDPSQSSELLSEAKKLNDSQAPK

SEQ ID NO: 951 - protein, 58 aa, ARTIFICIAL SEQUENCE
  Engineered IL-17A binding polypeptide
VDAKYAKEADDAAFEIAKLPNLTWYQWEAFIYKLRDDPSQSSELLSEAKKLNDSQAPK

SEQ ID NO: 952 - protein, 58 aa, ARTIFICIAL SEQUENCE
  Engineered IL-17A binding polypeptide
VDAKYAKEADDAAVEIAALPNLTWDQWWAFIEKLRDDPSQSSELLSEAKKLNDSQAPK

SEQ ID NO: 953 - protein, 58 aa, ARTIFICIAL SEQUENCE
  Engineered IL-17A binding polypeptide
VDAKYAKEADLAAMEIADLPNLTWDQWWAFIEKLRDDPSQSSELLSEAKKLNDSQAPK

SEQ ID NO: 954 - protein, 58 aa, ARTIFICIAL SEQUENCE
  Engineered IL-17A binding polypeptide
VDAKYAKEADQAAYEIAYLPNLTWDQWWAFINKLRDDPSQSSELLSEAKKLNDSQAPK

SEQ ID NO: 955 - protein, 58 aa, ARTIFICIAL SEQUENCE
  Engineered IL-17A binding polypeptide
VDAKYAKEADAAAIEIADLPNLTWDQWYAFIAKLRDDPSQSSELLSEAKKLNDSQAPK

SEQ ID NO: 956 - protein, 58 aa, ARTIFICIAL SEQUENCE
  Engineered IL-17A binding polypeptide
VDAKYAKEADDAAMEIADLPNLTWDQWDAFIMKLRDDPSQSSELLSEAKKLNDSQAPK

SEQ ID NO: 957 - protein, 58 aa, ARTIFICIAL SEQUENCE
  Engineered IL-17A binding polypeptide
VDAKYAKEADEAAVEIAYLPNLTWDQWFAFIQKLRDDPSQSSELLSEAKKLNDSQAPK

SEQ ID NO: 958 - protein, 58 aa, ARTIFICIAL SEQUENCE
  Engineered IL-17A binding polypeptide
VDAKYAKEADNAAVEIAELPNLTWDQWFAFIEKLRDDPSQSSELLSEAKKLNDSQAPK

SEQ ID NO: 959 - protein, 58 aa, ARTIFICIAL SEQUENCE
  Engineered IL-17A binding polypeptide
VDAKYAKEADDAAYEIAMLPNLTWDQWWAFIQKLRDDPSQSSELLSEAKKLNDSQAPK

SEQ ID NO: 960 - protein, 58 aa, ARTIFICIAL SEQUENCE
  Engineered IL-17A binding polypeptide
VDAKYAKEADNAAMEIADLPNLTWDQWAAFIDKLRDDPSQSSELLSEAKKLNDSQAPK

SEQ ID NO: 961 - protein, 58 aa, ARTIFICIAL SEQUENCE
  Engineered IL-17A binding polypeptide
VDAKYAKEADNAAVEIAYLPNLTWEQWFAFITKLRDDPSQSSELLSEAKKLNDSQAPK

SEQ ID NO: 962 - protein, 58 aa, ARTIFICIAL SEQUENCE
  Engineered IL-17A binding polypeptide
VDAKYAKEADEAAFEIAWLPNLTWDQWYAFIEKLRDDPSQSSELLSEAKKLNDSQAPK

SEQ ID NO: 963 - protein, 58 aa, ARTIFICIAL SEQUENCE
  Engineered IL-17A binding polypeptide
VDAKYAKEADEAAMEIAELPNLTWDQWWAFIGKLRDDPSQSSELLSEAKKLNDSQAPK

SEQ ID NO: 964 - protein, 58 aa, ARTIFICIAL SEQUENCE
  Engineered IL-17A binding polypeptide
VDAKYAKEADDAAFEIAMLPNLTWDQWAAFIDKLRDDPSQSSELLSEAKKLNDSQAPK

SEQ ID NO: 965 - protein, 58 aa, ARTIFICIAL SEQUENCE
  Engineered IL-17A binding polypeptide
VDAKYAKEADQAAMEIADLPNLTWDQWWAFINKLRDDPSQSSELLSEAKKLNDSQAPK

SEQ ID NO: 966 - protein, 58 aa, ARTIFICIAL SEQUENCE
  Engineered IL-17A binding polypeptide
VDAKYAKEADDAAVEIAYLPNLTWDQWWAFINKLRDDPSQSSELLSEAKKLNDSQAPK

SEQ ID NO: 967 - protein, 58 aa, ARTIFICIAL SEQUENCE
  Engineered IL-17A binding polypeptide
VDAKYAKEADDAAVEIAWLPNLTWDQWFAFIQKLRDDPSQSSELLSEAKKLNDSQAPK

SEQ ID NO: 968 - protein, 58 aa, ARTIFICIAL SEQUENCE
  Engineered IL-17A binding polypeptide
VDAKYAKEADEAAVEIADLPNLTWDQWYAFIEKLRDDPSQSSELLSEAKKLNDSQAPK

SEQ ID NO: 969 - protein, 58 aa, ARTIFICIAL SEQUENCE
  Engineered IL-17A binding polypeptide
VDAKYAKEADQAAVEIADLPNLTWDQWFAFIEKLRDDPSQSSELLSEAKKLNDSQAPK

SEQ ID NO: 970 - protein, 58 aa, ARTIFICIAL SEQUENCE
  Engineered IL-17A binding polypeptide
VDAKYAKEADQAAFEIAGLPNLTWDQWAAFIDKLRDDPSQSSELLSEAKKLNDSQAPK

SEQ ID NO: 971 - protein, 58 aa, ARTIFICIAL SEQUENCE
  Engineered IL-17A binding polypeptide
VDAKYAKEADDAAYEIAYLPNLTWEQWAAFIEKLRDDPSQSSELLSEAKKLNDSQAPK

SEQ ID NO: 972 - protein, 58 aa, ARTIFICIAL SEQUENCE
  Engineered IL-17A binding polypeptide
VDAKYAKEADDAAFEIASLPNLTWLQWEAFIMKLRDDPSQSSELLSEAKKLNDSQAPK

SEQ ID NO: 973 - protein, 58 aa, ARTIFICIAL SEQUENCE
  Engineered IL-17A binding polypeptide
VDAKYAKEADAAAVEIAALPNLTWDQWMAFIDKLRDDPSQSSELLSEAKKLNDSQAPK

SEQ ID NO: 974 - protein, 58 aa, ARTIFICIAL SEQUENCE
  Engineered IL-17A binding polypeptide
VDAKYAKEADDAAYEIAELPNLTWDQWYAFIAKLRDDPSQSSELLSEAKKLNDSQAPK

SEQ ID NO: 975 - protein, 58 aa, ARTIFICIAL SEQUENCE
  Engineered IL-17A binding polypeptide
VDAKYAKEADEAAVEIAELPNLTWDQWWAFIGKLRDDPSQSSELLSEAKKLNDSQAPK

SEQ ID NO: 976 - protein, 58 aa, ARTIFICIAL SEQUENCE
  Engineered IL-17A binding polypeptide
VDAKYAKEADDAAFEIAALPNLTWDQWAAFIDKLRDDPSQSSELLSEAKKLNDSQAPK

SEQ ID NO: 977 - protein, 58 aa, ARTIFICIAL SEQUENCE
  Engineered IL-17A binding polypeptide
VDAKYAKEADDAAVEIADLPNLTWDQWMAFINKLRDDPSQSSELLSEAKKLNDSQAPK

SEQ ID NO: 978 - protein, 58 aa, ARTIFICIAL SEQUENCE
  Engineered IL-17A binding polypeptide
VDAKYAKEADFAAMEIADLPNLTWDQWWAFIEKLRDDPSQSSELLSEAKKLNDSQAPK

SEQ ID NO: 979 - protein, 58 aa, ARTIFICIAL SEQUENCE
  Engineered IL-17A binding polypeptide
VDAKYAKEADDAAYEIAMLPNLTWDQWYAFIEKLRDDPSQSSELLSEAKKLNDSQAPK

SEQ ID NO: 980 - protein, 58 aa, ARTIFICIAL SEQUENCE
  Engineered IL-17A binding polypeptide
VDAKYAKEADEAAVEIAQLPNLTWDQWAAFIWKLRDDPSQSSELLSEAKKLNDSQAPK

SEQ ID NO: 981 - protein, 58 aa, ARTIFICIAL SEQUENCE
  Engineered IL-17A binding polypeptide
VDAKYAKEADDAAVEIAALPNLTWDQWFAFIDKLRDDPSQSSELLSEAKKLNDSQAPK

SEQ ID NO: 982 - protein, 58 aa, ARTIFICIAL SEQUENCE
  Engineered IL-17A binding polypeptide
VDAKYAKEADDAAYEIADLPNLTWDQWWAFINKLRDDPSQSSELLSEAKKLNDSQAPK

SEQ ID NO: 983 - protein, 58 aa, ARTIFICIAL SEQUENCE
  Engineered IL-17A binding polypeptide
VDAKYAKEADDAAVEIAFLPNLTWDQWAAFIEKLRDDPSQSSELLSEAKKLNDSQAPK

SEQ ID NO: 984 - protein, 58 aa, ARTIFICIAL SEQUENCE
  Engineered IL-17A binding polypeptide
VDAKYAKEADDAAMEIADLPNLTWEQWYAFIAKLRDDPSQSSELLSEAKKLNDSQAPK

SEQ ID NO: 985 - protein, 58 aa, ARTIFICIAL SEQUENCE
  Engineered IL-17A binding polypeptide
VDAKYAKEADQAAVEIADLPNLTWLQWFAFINKLRDDPSQSSELLSEAKKLNDSQAPK

SEQ ID NO: 986 - protein, 58 aa, ARTIFICIAL SEQUENCE
  Engineered IL-17A binding polypeptide
VDAKYAKEADDAAVEIAELPNLTWEQWFAFIDKLRDDPSQSSELLSEAKKLNDSQAPK

SEQ ID NO: 987 - protein, 58 aa, ARTIFICIAL SEQUENCE
  Engineered IL-17A binding polypeptide
VDAKYAKEADMAAIEIAALPNLTWDQWDAFIRKLRDDPSQSSELLSEAKKLNDSQAPK

SEQ ID NO: 988 - protein, 58 aa, ARTIFICIAL SEQUENCE
  Engineered IL-17A binding polypeptide
VDAKYAKEADEAAVEIAYLPNLTWDQWWAFISKLRDDPSQSSELLSEAKKLNDSQAPK

SEQ ID NO: 989 - protein, 58 aa, ARTIFICIAL SEQUENCE
  Engineered IL-17A binding polypeptide
VDAKYAKEADQAAVEIAELPNLTWDQWWAFINKLRDDPSQSSELLSEAKKLNDSQAPK

SEQ ID NO: 990 - protein, 58 aa, ARTIFICIAL SEQUENCE
  Engineered IL-17A binding polypeptide
VDAKYAKEADDAAIEIANLPNLTWEQWFAFINKLRDDPSQSSELLSEAKKLNDSQAPK

SEQ ID NO: 991 - protein, 58 aa, ARTIFICIAL SEQUENCE
  Engineered IL-17A binding polypeptide
VDAKYAKEADQAAFEIAELPNLTWDQWYAFIAKLRDDPSQSSELLSEAKKLNDSQAPK

SEQ ID NO: 992 - protein, 58 aa, ARTIFICIAL SEQUENCE
  Engineered IL-17A binding polypeptide
VDAKYAKEADDAAYEIAELPNLTWDQWWAFITKLRDDPSQSSELLSEAKKLNDSQAPK

SEQ ID NO: 993 - protein, 58 aa, ARTIFICIAL SEQUENCE
  Engineered IL-17A binding polypeptide
VDAKYAKEADDAAYEIAELPNLTWDQWFAFIGKLRDDPSQSSELLSEAKKLNDSQAPK

SEQ ID NO: 994 - protein, 58 aa, ARTIFICIAL SEQUENCE
  Engineered IL-17A binding polypeptide
VDAKYAKEADDAAYEIAMLPNLTWDQWYAFINKLRDDPSQSSELLSEAKKLNDSQAPK

SEQ ID NO: 995 - protein, 58 aa, ARTIFICIAL SEQUENCE
  Engineered IL-17A binding polypeptide
VDAKYAKEADDAAMEIALLPNLTWDQWWAFIEKLRDDPSQSSELLSEAKKLNDSQAPK

SEQ ID NO: 996 - protein, 58 aa, ARTIFICIAL SEQUENCE
  Engineered IL-17A binding polypeptide
VDAKYAKEADEAAVEIADLPNLTWDQWFAFIGKLRDDPSQSSELLSEAKKLNDSQAPK

SEQ ID NO: 997 - protein, 58 aa, ARTIFICIAL SEQUENCE
  Engineered IL-17A binding polypeptide
VDAKYAKEADDAAVEIAELPNLTWDQWAAFIQKLRDDPSQSSELLSEAKKLNDSQAPK

SEQ ID NO: 998 - protein, 58 aa, ARTIFICIAL SEQUENCE
  Engineered IL-17A binding polypeptide
VDAKYAKEADEAAMEIAELPNLTWDQWWAFITKLRDDPSQSSELLSEAKKLNDSQAPK

SEQ ID NO: 999 - protein, 58 aa, ARTIFICIAL SEQUENCE
  Engineered IL-17A binding polypeptide
VDAKYAKEADNAAVEIADLPNLTWDQWFAFINKLRDDPSQSSELLSEAKKLNDSQAPK

SEQ ID NO: 1000 - protein, 58 aa, ARTIFICIAL SEQUENCE
  Engineered IL-17A binding polypeptide
VDAKYAKEADDAAYEIAFLPNLTWDQWYAFIDKLRDDPSQSSELLSEAKKLNDSQAPK

SEQ ID NO: 1001 - protein, 58 aa, ARTIFICIAL SEQUENCE
  Engineered IL-17A binding polypeptide
VDAKYAKEADDAAVEIADLPNLTWDQWFAFIEKLRDDPSQSSELLSEAKKLNDSQAPK

SEQ ID NO: 1002 - protein, 58 aa, ARTIFICIAL SEQUENCE
  Engineered IL-17A binding polypeptide
VDAKYAKEADNAAAEIADLPNLTWDQWYAFIGKLRDDPSQSSELLSEAKKLNDSQAPK

SEQ ID NO: 1003 - protein, 58 aa, ARTIFICIAL SEQUENCE
  Engineered IL-17A binding polypeptide
VDAKYAKEADEAAVEIAFLPNLTWDQWWAFITKLRDDPSQSSELLSEAKKLNDSQAPK

SEQ ID NO: 1004 - protein, 58 aa, ARTIFICIAL SEQUENCE
  Engineered IL-17A binding polypeptide
VDAKYAKEADNAAVEIADLPNLTWDQWFAFIGKLRDDPSQSSELLSEAKKLNDSQAPK

SEQ ID NO: 1005 - protein, 58 aa, ARTIFICIAL SEQUENCE
  Engineered IL-17A binding polypeptide
VDAKYAKEADEAAVEIADLPNLTWDQWHAFITKLRDDPSQSSELLSEAKKLNDSQAPK

SEQ ID NO: 1006 - protein, 58 aa, ARTIFICIAL SEQUENCE
  Engineered IL-17A binding polypeptide
VDAKYAKEADDAAYEIAMLPNLTWDQWAAFIDKLRDDPSQSSELLSEAKKLNDSQAPK

SEQ ID NO: 1007 - protein, 58 aa, ARTIFICIAL SEQUENCE
  Engineered IL-17A binding polypeptide
VDAKYAKEADDAAYEIAQLPNLTWEQWFAFINKLRDDPSQSSELLSEAKKLNDSQAPK

SEQ ID NO: 1008 - protein, 58 aa, ARTIFICIAL SEQUENCE
  Engineered IL-17A binding polypeptide
VDAKYAKEADGAAYEIAGLPNLTWDQWFAFIDKLRDDPSQSSELLSEAKKLNDSQAPK

SEQ ID NO: 1009 - protein, 58 aa, ARTIFICIAL SEQUENCE
  Engineered IL-17A binding polypeptide
VDAKYAKEADNAAYEIALLPNLTWDQWEAFILKLRDDPSQSSELLSEAKKLNDSQAPK

SEQ ID NO: 1010 - protein, 58 aa, ARTIFICIAL SEQUENCE
  Engineered IL-17A binding polypeptide
VDAKYAKEADAAAMEIAGLPNLTWDQWFAFISKLRDDPSQSSELLSEAKKLNDSQAPK

SEQ ID NO: 1011 - protein, 58 aa, ARTIFICIAL SEQUENCE
  Engineered IL-17A binding polypeptide
VDAKYAKEADDAAVEIANLPNLTWDQWAAFIMKLRDDPSQSSELLSEAKKLNDSQAPK

SEQ ID NO: 1012 - protein, 58 aa, ARTIFICIAL SEQUENCE
  Engineered IL-17A binding polypeptide
VDAKYAKEADDAAVEIAELPNLTWDQWWAFINKLRDDPSQSSELLSEAKKLNDSQAPK

SEQ ID NO: 1013 - protein, 58 aa, ARTIFICIAL SEQUENCE
  Engineered IL-17A binding polypeptide
VDAKYAKEADDAAFEIAMLPNLTWDQWYAFIDKLRDDPSQSSELLSEAKKLNDSQAPK

SEQ ID NO: 1014 - protein, 58 aa, ARTIFICIAL SEQUENCE
  Engineered IL-17A binding polypeptide
VDAKYAKEADMAAVEIAELPNLTWEQWYAFIEKLRDDPSQSSELLSEAKKLNDSQAPK

SEQ ID NO: 1015 - protein, 58 aa, ARTIFICIAL SEQUENCE
  Engineered IL-17A binding polypeptide
VDAKYAKEADMAAVEIADLPNLTWDQWYAFIWKLRDDPSQSSELLSEAKKLNDSQAPK

SEQ ID NO: 1016 - protein, 58 aa, ARTIFICIAL SEQUENCE
  Engineered IL-17A binding polypeptide
VDAKYAKEADAAAMEIADLPNLTWDQWWAFITKLRDDPSQSSELLSEAKKLNDSQAPK

SEQ ID NO: 1017 - protein, 58 aa, ARTIFICIAL SEQUENCE
  Engineered IL-17A binding polypeptide
VDAKYAKEADDAAYEIAFLPNLTWDQWYAFILKLRDDPSQSSELLSEAKKLNDSQAPK

SEQ ID NO: 1018 - protein, 58 aa, ARTIFICIAL SEQUENCE
  Engineered IL-17A binding polypeptide
VDAKYAKEADQAAMEIAELPNLTWDQWEAFILKLRDDPSQSSELLSEAKKLNDSQAPK

SEQ ID NO: 1019 - protein, 58 aa, ARTIFICIAL SEQUENCE
  Engineered IL-17A binding polypeptide
VDAKYAKEADGAAYEIASLPNLTWDQWWAFIEKLRDDPSQSSELLSEAKKLNDSQAPK

SEQ ID NO: 1020 - protein, 58 aa, ARTIFICIAL SEQUENCE
  Engineered IL-17A binding polypeptide
VDAKYAKEADDAAYEIAFLPNLTWDQWDAFIMKLRDDPSQSSELLSEAKKLNDSQAPK

SEQ ID NO: 1021 - protein, 58 aa, ARTIFICIAL SEQUENCE
  Engineered IL-17A binding polypeptide
VDAKYAKEADDAAVEIAWLPNLTWDQWWAFIQKLRDDPSQSSELLSEAKKLNDSQAPK

SEQ ID NO: 1022 - protein, 58 aa, ARTIFICIAL SEQUENCE
  Engineered IL-17A binding polypeptide
VDAKYAKEADEAAVEIAYLPNLTWDQWWAFINKLRDDPSQSSELLSEAKKLNDSQAPK

SEQ ID NO: 1023 - protein, 58 aa, ARTIFICIAL SEQUENCE
  Engineered IL-17A binding polypeptide
VDAKYAKEADAAAFEIAALPNLTWDQWYAFIGKLRDDPSQSSELLSEAKKLNDSQAPK

SEQ ID NO: 1024 - protein, 58 aa, ARTIFICIAL SEQUENCE
  Engineered IL-17A binding polypeptide
VDAKYAKEADDAAYEIAELPNLTWDQWYAFIMKLRDDPSQSSELLSEAKKLNDSQAPK

SEQ ID NO: 1025 - protein, 58 aa, ARTIFICIAL SEQUENCE
  Engineered IL-17A binding polypeptide
VDAKYAKEADEAAYEIAALPNLTWDQWWAFIGKLRDDPSQSSELLSEAKKLNDSQAPK

SEQ ID NO: 1026 - protein, 58 aa, ARTIFICIAL SEQUENCE
  Engineered IL-17A binding polypeptide
VDAKYAKEADDAAVEIAALPNLTWDQWIAFIDKLRDDPSQSSELLSEAKKLNDSQAPK

SEQ ID NO: 1027 - protein, 58 aa, ARTIFICIAL SEQUENCE
  Engineered IL-17A binding polypeptide
VDAKYAKEADEAAMEIADLPNLTWEQWAAFIDKLRDDPSQSSELLSEAKKLNDSQAPK

SEQ ID NO: 1028 - protein, 58 aa, ARTIFICIAL SEQUENCE
  Engineered IL-17A binding polypeptide
VDAKYAKEADAAAVEIARLPNLTWLQWEAFILKLRDDPSQSSELLSEAKKLNDSQAPK

SEQ ID NO: 1029 - protein, 58 aa, ARTIFICIAL SEQUENCE
  Engineered IL-17A binding polypeptide
VDAKYAKEADAAAVEIAELPNLTWEQWWAFIQKLRDDPSQSSELLSEAKKLNDSQAPK

SEQ ID NO: 1030 - protein, 58 aa, ARTIFICIAL SEQUENCE
  Engineered IL-17A binding polypeptide
VDAKYAKEADDAAMEIAALPNLTWDQWWAFINKLRDDPSQSSELLSEAKKLNDSQAPK

SEQ ID NO: 1031 - protein, 58 aa, ARTIFICIAL SEQUENCE
  Engineered IL-17A binding polypeptide
VDAKYAKEADDAAFEIAFLPNLTWDQWHAFINKLRDDPSQSSELLSEAKKLNDSQAPK

SEQ ID NO: 1032 - protein, 58 aa, ARTIFICIAL SEQUENCE
  Engineered IL-17A binding polypeptide
VDAKYAKEADNAAVEIAALPNLTWIQWHAFIEKLRDDPSQSSELLSEAKKLNDSQAPK

SEQ ID NO: 1033 - protein, 58 aa, ARTIFICIAL SEQUENCE
  Engineered IL-17A binding polypeptide
VDAKYAKEADSAAVEIAVLPNLTWDQWYAFILKLRDDPSQSSELLSEAKKLNDSQAPK

SEQ ID NO: 1034 - protein, 58 aa, ARTIFICIAL SEQUENCE
  Engineered IL-17A binding polypeptide
VDAKYAKEADDAAYEIAHLPNLTWDQWEAFIGKLRDDPSQSSELLSEAKKLNDSQAPK

SEQ ID NO: 1035 - protein, 58 aa, ARTIFICIAL SEQUENCE
  Engineered IL-17A binding polypeptide
VDAKYAKEADEAAVEIAVLPNLTWDQWAAFIQKLRDDPSQSSELLSEAKKLNDSQAPK

SEQ ID NO: 1036 - protein, 58 aa, ARTIFICIAL SEQUENCE
  Engineered IL-17A binding polypeptide
VDAKYAKEADNAAMEIAELPNLTWDQWFAFIHKLRDDPSQSSELLSEAKKLNDSQAPK

SEQ ID NO: 1037 - protein, 58 aa, ARTIFICIAL SEQUENCE
  Engineered IL-17A binding polypeptide
VDAKYAKEADDAAMEIAELPNLTWEQWWAFINKLRDDPSQSSELLSEAKKLNDSQAPK

SEQ ID NO: 1038 - protein, 58 aa, ARTIFICIAL SEQUENCE
  Engineered IL-17A binding polypeptide
VDAKYAKEADDAAFEIAQLPNLTWDQWYAFIDKLRDDPSQSSELLSEAKKLNDSQAPK

SEQ ID NO: 1039 - protein, 58 aa, ARTIFICIAL SEQUENCE
  Engineered IL-17A binding polypeptide
VDAKYAKEADDAAVEIAMLPNLTWDQWWAFINKLRDDPSQSSELLSEAKKLNDSQAPK

SEQ ID NO: 1040 - protein, 58 aa, ARTIFICIAL SEQUENCE
  Engineered IL-17A binding polypeptide
VDAKYAKEADDAAYEIAELPNLTWDQWYAFITKLRDDPSQSSELLSEAKKLNDSQAPK

SEQ ID NO: 1041 - protein, 58 aa, ARTIFICIAL SEQUENCE
  Engineered IL-17A binding polypeptide
VDAKYAKEADNAALEIAELPNLTWDQWWAFIRKLRDDPSQSSELLSEAKKLNDSQAPK

SEQ ID NO: 1042 - protein, 58 aa, ARTIFICIAL SEQUENCE
  Engineered IL-17A binding polypeptide
VDAKYAKEADNAAYEIAELPNLTWDQWYAFINKLRDDPSQSSELLSEAKKLNDSQAPK

SEQ ID NO: 1043 - protein, 58 aa, ARTIFICIAL SEQUENCE
  Engineered IL-17A binding polypeptide
VDAKYAKEADLAAMEIAELPNLTWDQWYAFINKLRDDPSQSSELLSEAKKLNDSQAPK

SEQ ID NO: 1044 - protein, 58 aa, ARTIFICIAL SEQUENCE
  Engineered IL-17A binding polypeptide
VDAKYAKEADDAAVEIADLPNLTWAQWYAFINKLRDDPSQSSELLSEAKKLNDSQAPK

SEQ ID NO: 1045 - protein, 58 aa, ARTIFICIAL SEQUENCE
  Engineered IL-17A binding polypeptide
VDAKYAKEADDAAMEIAFLPNLTWDQWWAFIMKLRDDPSQSSELLSEAKKLNDSQAPK

SEQ ID NO: 1046 - protein, 58 aa, ARTIFICIAL SEQUENCE
  Engineered IL-17A binding polypeptide
VDAKYAKEADEAAVEIAHLPNLTWDQWFAFITKLRDDPSQSSELLSEAKKLNDSQAPK

SEQ ID NO: 1047 - protein, 58 aa, ARTIFICIAL SEQUENCE
  Engineered IL-17A binding polypeptide
VDAKYAKEADDAAYEIAFLPNLTWDQWWAFIGKLRDDPSQSSELLSEAKKLNDSQAPK

SEQ ID NO: 1048 - protein, 58 aa, ARTIFICIAL SEQUENCE
  Engineered IL-17A binding polypeptide
VDAKYAKEADHAAYEIAFLPNLTWDQWFAFIEKLRDDPSQSSELLSEAKKLNDSQAPK

SEQ ID NO: 1049 - protein, 58 aa, ARTIFICIAL SEQUENCE
  Engineered IL-17A binding polypeptide
VDAKYAKEADQAAVEIANLPNLTWDQWAAFIMKLRDDPSQSSELLSEAKKLNDSQAPK

SEQ ID NO: 1050 - protein, 58 aa, ARTIFICIAL SEQUENCE
  Engineered IL-17A binding polypeptide
VDAKYAKEADQAAYEIAGLPNLTWDQWAAFIEKLRDDPSQSSELLSEAKKLNDSQAPK

SEQ ID NO: 1051 - protein, 58 aa, ARTIFICIAL SEQUENCE
  Engineered IL-17A binding polypeptide
VDAKYAKEADEAAVEIALLPNLTWDQWFAFIDKLRDDPSQSSELLSEAKKLNDSQAPK

SEQ ID NO: 1052 - protein, 58 aa, ARTIFICIAL SEQUENCE
  Engineered IL-17A binding polypeptide
VDAKYAKEADEAAYEIAYLPNLTWDQWYAFISKLRDDPSQSSELLSEAKKLNDSQAPK

SEQ ID NO: 1053 - protein, 58 aa, ARTIFICIAL SEQUENCE
  Engineered IL-17A binding polypeptide
VDAKYAKEADEAAVEIAGLPNLTWDQWEAFILKLRDDPSQSSELLSEAKKLNDSQAPK

SEQ ID NO: 1054 - protein, 58 aa, ARTIFICIAL SEQUENCE
  Engineered IL-17A binding polypeptide
VDAKYAKEADDAAMEIAELPNLTWDQWWAFIAKLRDDPSQSSELLSEAKKLNDSQAPK

SEQ ID NO: 1055 - protein, 58 aa, ARTIFICIAL SEQUENCE
  Engineered IL-17A binding polypeptide
VDAKYAKEADDAALEIAYLPNLTWDQWWAFITKLRDDPSQSSELLSEAKKLNDSQAPK

SEQ ID NO: 1056 - protein, 58 aa, ARTIFICIAL SEQUENCE
  Engineered IL-17A binding polypeptide
VDAKYAKEADAAAVEIADLPNLTWDQWWAFIDKLRDDPSQSSELLSEAKKLNDSQAPK

SEQ ID NO: 1057 - protein, 58 aa, ARTIFICIAL SEQUENCE
  Engineered IL-17A binding polypeptide
VDAKYAKEADSAAVEIADLPNLTWDQWYAFIGKLRDDPSQSSELLSEAKKLNDSQAPK

SEQ ID NO: 1058 - protein, 58 aa, ARTIFICIAL SEQUENCE
  Engineered IL-17A binding polypeptide
VDAKYAKEADMAAVEIAELPNLTWDQWYAFIGKLRDDPSQSSELLSEAKKLNDSQAPK

SEQ ID NO: 1059 - protein, 58 aa, ARTIFICIAL SEQUENCE
  Engineered IL-17A binding polypeptide
VDAKYAKEADKAAVEIAELPNLTWDQWWAFIMKLRDDPSQSSELLSEAKKLNDSQAPK

SEQ ID NO: 1060 - protein, 58 aa, ARTIFICIAL SEQUENCE
  Engineered IL-17A binding polypeptide
VDAKYAKEADDAAMEIADLPNLTWDQWMAFIDKLRDDPSQSSELLSEAKKLNDSQAPK

SEQ ID NO: 1061 - protein, 58 aa, ARTIFICIAL SEQUENCE
  Engineered IL-17A binding polypeptide
VDAKYAKEADDAAVEIAGLPNLTWDQWWAFIDKLRDDPSQSSELLSEAKKLNDSQAPK

SEQ ID NO: 1062 - protein, 58 aa, ARTIFICIAL SEQUENCE
  Engineered IL-17A binding polypeptide
VDAKYAKEADDAAYEIAELPNLTWDQWFAFIAKLRDDPSQSSELLSEAKKLNDSQAPK

SEQ ID NO: 1063 - protein, 58 aa, ARTIFICIAL SEQUENCE
  Engineered IL-17A binding polypeptide
VDAKYAKEADDAAMEIALLPNLTWDQWHAFIQKLRDDPSQSSELLSEAKKLNDSQAPK

SEQ ID NO: 1064 - protein, 58 aa, ARTIFICIAL SEQUENCE
  Engineered IL-17A binding polypeptide
VDAKYAKEADIAAFEIAGLPNLTWDQWFAFIQKLRDDPSQSSELLSEAKKLNDSQAPK

SEQ ID NO: 1065 - protein, 58 aa, ARTIFICIAL SEQUENCE
  Engineered IL-17A binding polypeptide
VDAKYAKEADQAAVEIADLPNLTWDQWWAFITKLRDDPSQSSELLSEAKKLNDSQAPK

SEQ ID NO: 1066 - protein, 58 aa, ARTIFICIAL SEQUENCE
  Engineered IL-17A binding polypeptide
VDAKYAKEADMAAVEIAGLPNLTWDQWYAFINKLRDDPSQSSELLSEAKKLNDSQAPK

SEQ ID NO: 1067 - protein, 58 aa, ARTIFICIAL SEQUENCE
  Engineered IL-17A binding polypeptide
VDAKYAKEADDAAMEIAALPNLTWDQWWAFIDKLRDDPSQSSELLSEAKKLNDSQAPK

SEQ ID NO: 1068 - protein, 58 aa, ARTIFICIAL SEQUENCE
  Engineered IL-17A binding polypeptide
VDAKYAKEADDAAVEIAWLPNLTWDQWYAFIQKLRDDPSQSSELLSEAKKLNDSQAPK

SEQ ID NO: 1069 - protein, 58 aa, ARTIFICIAL SEQUENCE
  Engineered IL-17A binding polypeptide
VDAKYAKEADNAAYEIAFLPNLTWDQWYAFINKLRDDPSQSSELLSEAKKLNDSQAPK

SEQ ID NO: 1070 - protein, 58 aa, ARTIFICIAL SEQUENCE
  Engineered IL-17A binding polypeptide
VDAKYAKEADDAAFEIAALPNLTWDQWWAFIEKLRDDPSQSSELLSEAKKLNDSQAPK

SEQ ID NO: 1071 - protein, 58 aa, ARTIFICIAL SEQUENCE
  Engineered IL-17A binding polypeptide
VDAKYAKEADAAAYEIAELPNLTWDQWYAFIEKLRDDPSQSSELLSEAKKLNDSQAPK

SEQ ID NO: 1072 - protein, 58 aa, ARTIFICIAL SEQUENCE
  Engineered IL-17A binding polypeptide
VDAKYAKEADDAAYEIAFLPNLTWDQWDAFIEKLRDDPSQSSELLSEAKKLNDSQAPK

SEQ ID NO: 1073 - protein, 58 aa, ARTIFICIAL SEQUENCE
  Engineered IL-17A binding polypeptide
VDAKYAKEADDAAVEIAFLPNLTWEQWYAFIEKLRDDPSQSSELLSEAKKLNDSQAPK

SEQ ID NO: 1074 - protein, 58 aa, ARTIFICIAL SEQUENCE
  Engineered IL-17A binding polypeptide
VDAKYAKEADNAAMEIAALPNLTWDQWYAFINKLRDDPSQSSELLSEAKKLNDSQAPK

SEQ ID NO: 1075 - protein, 58 aa, ARTIFICIAL SEQUENCE
  Engineered IL-17A binding polypeptide
VDAKYAKEADDAAVEIAFLPNLTWDQWDAFINKLRDDPSQSSELLSEAKKLNDSQAPK

SEQ ID NO: 1076 - protein, 58 aa, ARTIFICIAL SEQUENCE
  Engineered IL-17A binding polypeptide
VDAKYAKEADAAAYEIALLPNLTWDQWFAFIDKLRDDPSQSSELLSEAKKLNDSQAPK

SEQ ID NO: 1077 - protein, 58 aa, ARTIFICIAL SEQUENCE
  Engineered IL-17A binding polypeptide
VDAKYAKEADDAAYEIAGLPNLTWDQWWAFISKLRDDPSQSSELLSEAKKLNDSQAPK

SEQ ID NO: 1078 - protein, 58 aa, ARTIFICIAL SEQUENCE
  Engineered IL-17A binding polypeptide
VDAKYAKEADDAAFEIAELPNLTWDQWWAFITKLRDDPSQSSELLSEAKKLNDSQAPK

SEQ ID NO: 1079 - protein, 58 aa, ARTIFICIAL SEQUENCE
  Engineered IL-17A binding polypeptide
VDAKYAKEADEAAMEIADLPNLTWAQWYAFIDKLRDDPSQSSELLSEAKKLNDSQAPK

SEQ ID NO: 1080 - protein, 58 aa, ARTIFICIAL SEQUENCE
  Engineered IL-17A binding polypeptide
VDAKYAKEADMAAVEIAALPNLTWDQWYAFIEKLRDDPSQSSELLSEAKKLNDSQAPK

SEQ ID NO: 1081 - protein, 58 aa, ARTIFICIAL SEQUENCE
  Engineered IL-17A binding polypeptide
VDAKYAKEADNAAVEIAELPNLTWEQWWAFINKLRDDPSQSSELLSEAKKLNDSQAPK

SEQ ID NO: 1082 - protein, 58 aa, ARTIFICIAL SEQUENCE
  Engineered IL-17A binding polypeptide
VDAKYAKEADIAAVEIALLPNLTWDQWAAFISKLRDDPSQSSELLSEAKKLNDSQAPK

SEQ ID NO: 1083 - protein, 58 aa, ARTIFICIAL SEQUENCE
  Engineered IL-17A binding polypeptide
VDAKYAKEADRAAVEIASLPNLTWDQWYAFITKLRDDPSQSSELLSEAKKLNDSQAPK

SEQ ID NO: 1084 - protein, 58 aa, ARTIFICIAL SEQUENCE
  Engineered IL-17A binding polypeptide
VDAKYAKEADAAAVEIANLPNLTWDQWEAFIHKLRDDPSQSSELLSEAKKLNDSQAPK

SEQ ID NO: 1085 - protein, 58 aa, ARTIFICIAL SEQUENCE
  Engineered IL-17A binding polypeptide
VDAKYAKEADDAAVEIALLPNLTWDQWFAFIMKLRDDPSQSSELLSEAKKLNDSQAPK

SEQ ID NO: 1086 - protein, 58 aa, ARTIFICIAL SEQUENCE
  Engineered IL-17A binding polypeptide
VDAKYAKEADDAAVEIANLPNLTWAQWHAFIQKLRDDPSQSSELLSEAKKLNDSQAPK

SEQ ID NO: 1087 - protein, 58 aa, ARTIFICIAL SEQUENCE
  Engineered IL-17A binding polypeptide
VDAKYAKEADNAAVEIAWLPNLTWDQWFAFITKLRDDPSQSSELLSEAKKLNDSQAPK

SEQ ID NO: 1088 - protein, 58 aa, ARTIFICIAL SEQUENCE
  Engineered IL-17A binding polypeptide
VDAKYAKEADFAAIEIAELPNLTWDQWHAFIAKLRDDPSQSSELLSEAKKLNDSQAPK

SEQ ID NO: 1089 - protein, 58 aa, ARTIFICIAL SEQUENCE
  Engineered IL-17A binding polypeptide
VDAKYAKEADIAAFEIAMLPNLTWLQWEAFIAKLRDDPSQSSELLSEAKKLNDSQAPK

SEQ ID NO: 1090 - protein, 58 aa, ARTIFICIAL SEQUENCE
  Engineered IL-17A binding polypeptide
VDAKYAKEADGAAMEIALLPNLTWDQWYAFINKLRDDPSQSSELLSEAKKLNDSQAPK

SEQ ID NO: 1091 - protein, 58 aa, ARTIFICIAL SEQUENCE
  Engineered IL-17A binding polypeptide
VDAKYAKEADAAAMEIAFLPNLTWDQWDAFILKLRDDPSQSSELLSEAKKLNDSQAPK

SEQ ID NO: 1092 - protein, 58 aa, ARTIFICIAL SEQUENCE
  Engineered IL-17A binding polypeptide
VDAKYAKEADAAAMEIANLPNLTWDQWAAFIRKLRDDPSQSSELLSEAKKLNDSQAPK

SEQ ID NO: 1093 - protein, 58 aa, ARTIFICIAL SEQUENCE
  Engineered IL-17A binding polypeptide
VDAKYAKEADDAAYEIAGLPNLTWLQWDAFIQKLRDDPSQSSELLSEAKKLNDSQAPK

SEQ ID NO: 1094 - protein, 58 aa, ARTIFICIAL SEQUENCE
  Engineered IL-17A binding polypeptide
VDAKYAKEADLAAIEIANLPNLTWDQWHAFIFKLRDDPSQSSELLSEAKKLNDSQAPK

SEQ ID NO: 1095 - protein, 58 aa, ARTIFICIAL SEQUENCE
  Engineered IL-17A binding polypeptide
VDAKYAKEADRAAYEIAELPNLTWDQWYAFISKLRDDPSQSSELLSEAKKLNDSQAPK

SEQ ID NO: 1096 - protein, 58 aa, ARTIFICIAL SEQUENCE
  Engineered IL-17A binding polypeptide
VDAKYAKEADHAAYEIAGLPNLTWDQWHAFISKLRDDPSQSSELLSEAKKLNDSQAPK

SEQ ID NO: 1097 - protein, 58 aa, ARTIFICIAL SEQUENCE
  Engineered IL-17A binding polypeptide
VDAKYAKEADNAAIEIALLPNLTWDQWWAFILKLRDDPSQSSELLSEAKKLNDSQAPK

SEQ ID NO: 1098 - protein, 58 aa, ARTIFICIAL SEQUENCE
  Engineered IL-17A binding polypeptide
VDAKYAKEADAAAVEIAALPNLTWDQWDAFIFKLRDDPSQSSELLSEAKKLNDSQAPK

SEQ ID NO: 1099 - protein, 58 aa, ARTIFICIAL SEQUENCE
  Engineered IL-17A binding polypeptide
VDAKYAKEADTAAVEIAQLPNLTWDQWAAFIQKLRDDPSQSSELLSEAKKLNDSQAPK

SEQ ID NO: 1100 - protein, 58 aa, ARTIFICIAL SEQUENCE
  Engineered IL-17A binding polypeptide
VDAKYAKEADRAAVEIAHLPNLTWIQWEAFINKLRDDPSQSSELLSEAKKLNDSQAPK

SEQ ID NO: 1101 - protein, 58 aa, ARTIFICIAL SEQUENCE
  Engineered IL-17A binding polypeptide
VDAKYAKEADSAAVEIAELPNLTWDQWWAFIRKLRDDPSQSSELLSEAKKLNDSQAPK

SEQ ID NO: 1102 - protein, 58 aa, ARTIFICIAL SEQUENCE
  Engineered IL-17A binding polypeptide
VDAKYAKEADQAAFEIAGLPNLTWDQWFAFIRKLRDDPSQSSELLSEAKKLNDSQAPK

SEQ ID NO: 1103 - protein, 58 aa, ARTIFICIAL SEQUENCE
  Engineered IL-17A binding polypeptide
VDAKYAKEADEAAVEIAALPNLTWDQWLAFILKLRDDPSQSSELLSEAKKLNDSQAPK

SEQ ID NO: 1104 - protein, 58 aa, ARTIFICIAL SEQUENCE
  Engineered IL-17A binding polypeptide
VDAKYAKEADNAAVEIANLPNLTWLQWWAFINKLRDDPSQSSELLSEAKKLNDSQAPK

SEQ ID NO: 1105 - protein, 58 aa, ARTIFICIAL SEQUENCE
  Engineered IL-17A binding polypeptide
VDAKYAKEADIAALEIANLPNLTWDQWWAFITKLRDDPSQSSELLSEAKKLNDSQAPK

SEQ ID NO: 1106 - protein, 58 aa, ARTIFICIAL SEQUENCE
  Engineered IL-17A binding polypeptide
VDAKYAKEADIAAVEIAWLPNLTWAQWHAFITKLRDDPSQSSELLSEAKKLNDSQAPK

SEQ ID NO: 1107 - protein, 58 aa, ARTIFICIAL SEQUENCE
  Engineered IL-17A binding polypeptide
VDAKYAKEADVAAAEIAELPNLTWDQWAAFIAKLRDDPSQSSELLSEAKKLNDSQAPK

SEQ ID NO: 1108 - protein, 58 aa, ARTIFICIAL SEQUENCE
  Engineered IL-17A binding polypeptide
VDAKYAKEADDAAVEIAELPNLTWMQWEAFISKLRDDPSQSSELLSEAKKLNDSQAPK

SEQ ID NO: 1109 - protein, 58 aa, ARTIFICIAL SEQUENCE
  Engineered IL-17A binding polypeptide
VDAKYAKEADQAAMEIAKLPNLTWDQWYAFITKLRDDPSQSSELLSEAKKLNDSQAPK

SEQ ID NO: 1110 - protein, 58 aa, ARTIFICIAL SEQUENCE
  Engineered IL-17A binding polypeptide
VDAKYAKEADQAAYEIADLPNLTWDQWFAFINKLRDDPSQSSELLSEAKKLNDSQAPK

SEQ ID NO: 1111 - protein, 58 aa, ARTIFICIAL SEQUENCE
  Engineered IL-17A binding polypeptide
VDAKYAKEADKAAYEIAQLPNLTWEQWWAFIDKLRDDPSQSSELLSEAKKLNDSQAPK

SEQ ID NO: 1112 - protein, 58 aa, ARTIFICIAL SEQUENCE
  Engineered IL-17A binding polypeptide
VDAKYAKEADDAAVEIAWLPNLTWDQWYAFITKLRDDPSQSSELLSEAKKLNDSQAPK

SEQ ID NO: 1113 - protein, 58 aa, ARTIFICIAL SEQUENCE
  Engineered IL-17A binding polypeptide
VDAKYAKEADRAAVEIANLPNLTWWQWEAFIAKLRDDPSQSSELLSEAKKLNDSQAPK

SEQ ID NO: 1114 - protein, 58 aa, ARTIFICIAL SEQUENCE
  Engineered IL-17A binding polypeptide
VDAKYAKEADEAAMEIANLPNLTWEQWWAFIQKLRDDPSQSSELLSEAKKLNDSQAPK

SEQ ID NO: 1115 - protein, 58 aa, ARTIFICIAL SEQUENCE
  Engineered IL-17A binding polypeptide
VDAKYAKEADTAAYEIANLPNLTWDQWFAFIEKLRDDPSQSSELLSEAKKLNDSQAPK

SEQ ID NO: 1116 - protein, 58 aa, ARTIFICIAL SEQUENCE
  Engineered IL-17A binding polypeptide
VDAKYAKEADDAAIEIADLPNLTWIQWLAFIEKLRDDPSQSSELLSEAKKLNDSQAPK

SEQ ID NO: 1117 - protein, 58 aa, ARTIFICIAL SEQUENCE
  Engineered IL-17A binding polypeptide
VDAKYAKEADDAAIEIALLPNLTWFQWDAFINKLRDDPSQSSELLSEAKKLNDSQAPK

SEQ ID NO: 1118 - protein, 58 aa, ARTIFICIAL SEQUENCE
  Engineered IL-17A binding polypeptide
VDAKYAKEADRAAMEIASLPNLTWDQWWAFIQKLRDDPSQSSELLSEAKKLNDSQAPK

SEQ ID NO: 1119 - protein, 58 aa, ARTIFICIAL SEQUENCE
  Engineered IL-17A binding polypeptide
VDAKYAKEADKAAVEIAQLPNLTWDQWWAFIMKLRDDPSQSSELLSEAKKLNDSQAPK

SEQ ID NO: 1120 - protein, 58 aa, ARTIFICIAL SEQUENCE
  Engineered IL-17A binding polypeptide
VDAKYAKEADMAALEIAELPNLTWDQWYAFIDKLRDDPSQSSELLSEAKKLNDSQAPK

SEQ ID NO: 1121 - protein, 58 aa, ARTIFICIAL SEQUENCE
  Engineered IL-17A binding polypeptide
VDAKYAKEADGAAVEIAMLPNLTWDQWWAFITKLRDDPSQSSELLSEAKKLNDSQAPK

SEQ ID NO: 1122 - protein, 58 aa, ARTIFICIAL SEQUENCE
  Engineered IL-17A binding polypeptide
VDAKYAKEADDAAYEIAELPNLTWDQWYAFIDKLRDDPSQSSELLSEAKKLNDSQAPK

SEQ ID NO: 1123 - protein, 58 aa, ARTIFICIAL SEQUENCE
  Engineered IL-17A binding polypeptide
VDAKYAKEADNAAYEIAQLPNLTWDQWFAFIEKLRDDPSQSSELLSEAKKLNDSQAPK

SEQ ID NO: 1124 - protein, 58 aa, ARTIFICIAL SEQUENCE
  Engineered IL-17A binding polypeptide
VDAKYAKEADAAAVEIAELPNLTWDQWLAFISKLRDDPSQSSELLSEAKKLNDSQAPK

SEQ ID NO: 1125 - protein, 58 aa, ARTIFICIAL SEQUENCE
  Engineered IL-17A binding polypeptide
VDAKYAKEADSAAYEIAGLPNLTWDQWDAFISKLRDDPSQSSELLSEAKKLNDSQAPK

SEQ ID NO: 1126 - protein, 58 aa, ARTIFICIAL SEQUENCE
  Engineered IL-17A binding polypeptide
VDAKYAKEADGAAYEIALLPNLTWDQWAAFIDKLRDDPSQSSELLSEAKKLNDSQAPK

SEQ ID NO: 1127 - protein, 58 aa, ARTIFICIAL SEQUENCE
  Engineered IL-17A binding polypeptide
VDAKYAKEADSAAIEIAYLPNLTWDQWYAFIEKLRDDPSQSSELLSEAKKLNDSQAPK

SEQ ID NO: 1128 - protein, 58 aa, ARTIFICIAL SEQUENCE
  Engineered IL-17A binding polypeptide
VDAKYAKEADLAAIEIAYLPNLTWDQWAAFIRKLRDDPSQSSELLSEAKKLNDSQAPK

SEQ ID NO: 1129 - protein, 58 aa, ARTIFICIAL SEQUENCE
  Engineered IL-17A binding polypeptide
VDAKYAKEADDAAFEIAYLPNLTWEQWWAFIKKLRDDPSQSSELLSEAKKLNDSQAPK

SEQ ID NO: 1130 - protein, 58 aa, ARTIFICIAL SEQUENCE
  Engineered IL-17A binding polypeptide
VDAKYAKEADEAAVEIAVLPNLTWEQWFAFIMKLRDDPSQSSELLSEAKKLNDSQAPK

SEQ ID NO: 1131 - protein, 58 aa, ARTIFICIAL SEQUENCE
  Engineered IL-17A binding polypeptide
VDAKYAKEADDAAMEIAMLPNLTWDQWYAFIEKLRDDPSQSSELLSEAKKLNDSQAPK

SEQ ID NO: 1132 - protein, 58 aa, ARTIFICIAL SEQUENCE
  Engineered IL-17A binding polypeptide
VDAKYAKEADEAAMEIAALPNLTWDQWYAFIGKLRDDPSQSSELLSEAKKLNDSQAPK

SEQ ID NO: 1133 - protein, 58 aa, ARTIFICIAL SEQUENCE
  Engineered IL-17A binding polypeptide
VDAKYAKEADFAAFEIAELPNLTWEQWFAFINKLRDDPSQSSELLSEAKKLNDSQAPK

SEQ ID NO: 1134 - protein, 58 aa, ARTIFICIAL SEQUENCE
  Engineered IL-17A binding polypeptide
VDAKYAKEADNAAMEIANLPNLTWAQWAAFIGKLRDDPSQSSELLSEAKKLNDSQAPK

SEQ ID NO: 1135 - protein, 58 aa, ARTIFICIAL SEQUENCE
  Engineered IL-17A binding polypeptide
VDAKYAKEADDAAVEIANLPNLTWIQWEAFIQKLRDDPSQSSELLSEAKKLNDSQAPK

SEQ ID NO: 1136 - protein, 58 aa, ARTIFICIAL SEQUENCE
  Engineered IL-17A binding polypeptide
VDAKYAKEADDAALEIAQLPNLTWDQWEAFILKLRDDPSQSSELLSEAKKLNDSQAPK

SEQ ID NO: 1137 - protein, 58 aa, ARTIFICIAL SEQUENCE
  Engineered IL-17A binding polypeptide
VDAKYAKEADDAAFEIAHLPNLTWLQWAAFIKKLRDDPSQSSELLSEAKKLNDSQAPK

SEQ ID NO: 1138 - protein, 58 aa, ARTIFICIAL SEQUENCE
  Engineered IL-17A binding polypeptide
VDAKYAKEADEAAMEIALLPNLTWDQWWAFITKLRDDPSQSSELLSEAKKLNDSQAPK

SEQ ID NO: 1139 - protein, 58 aa, ARTIFICIAL SEQUENCE
  Engineered IL-17A binding polypeptide
VDAKYAKEADLAAMEIAELPNLTWDQWFAFIYKLRDDPSQSSELLSEAKKLNDSQAPK

SEQ ID NO: 1140 - protein, 58 aa, ARTIFICIAL SEQUENCE
  Engineered IL-17A binding polypeptide
VDAKYAKEADHAAVEIAILPNLTWAQWMAFIEKLRDDPSQSSELLSEAKKLNDSQAPK

SEQ ID NO: 1141 - protein, 58 aa, ARTIFICIAL SEQUENCE
  Engineered IL-17A binding polypeptide
VDAKYAKEADKAAVEIANLPNLTWIQWWAFIRKLRDDPSQSSELLSEAKKLNDSQAPK

SEQ ID NO: 1142 - protein, 58 aa, ARTIFICIAL SEQUENCE
  Engineered IL-17A binding polypeptide
VDAKYAKEADKAAFEIAILPNLTWDQWYAFIWKLRDDPSQSSELLSEAKKLNDSQAPK

SEQ ID NO: 1143 - protein, 58 aa, ARTIFICIAL SEQUENCE
  Engineered IL-17A binding polypeptide
VDAKYAKEADEAAVEIAELPNLTWDQWWAFIMKLRDDPSQSSELLSEAKKLNDSQAPK

SEQ ID NO: 1144 - protein, 58 aa, ARTIFICIAL SEQUENCE
  Engineered IL-17A binding polypeptide
VDAKYAKEADRAAVEIAHLPNLTWDQWFAFIEKLRDDPSQSSELLSEAKKLNDSQAPK

SEQ ID NO: 1145 - protein, 58 aa, ARTIFICIAL SEQUENCE
  Engineered IL-17A binding polypeptide
VDAKYAKEADGAAMEIAELPNLTWDQWDAFIRKLRDDPSQSSELLSEAKKLNDSQAPK

SEQ ID NO: 1146 - protein, 58 aa, ARTIFICIAL SEQUENCE
  Engineered IL-17A binding polypeptide
VDAKYAKEADMAAIEIADLPNLTWYQWYAFISKLRDDPSQSSELLSEAKKLNDSQAPK

SEQ ID NO: 1147 - protein, 58 aa, ARTIFICIAL SEQUENCE
  Engineered IL-17A binding polypeptide
VDAKYAKEADKAAVEIAMLPNLTWDQWYAFIMKLRDDPSQSSELLSEAKKLNDSQAPK

SEQ ID NO: 1148 - protein, 58 aa, ARTIFICIAL SEQUENCE
  Engineered IL-17A binding polypeptide
VDAKYAKEADRAAVEIAYLPNLTWDQWWAFIQKLRDDPSQSSELLSEAKKLNDSQAPK

SEQ ID NO: 1149 - protein, 58 aa, ARTIFICIAL SEQUENCE
  Engineered IL-17A binding polypeptide
VDAKYAKEADDAAMEIAWLPNLTWYQWWAFIQKLRDDPSQSSELLSEAKKLNDSQAPK

SEQ ID NO: 1150 - protein, 58 aa, ARTIFICIAL SEQUENCE
  Engineered IL-17A binding polypeptide
VDAKYAKEADMAAYEIAGLPNLTWDQWWAFIDKLRDDPSQSSELLSEAKKLNDSQAPK

SEQ ID NO: 1151 - protein, 58 aa, ARTIFICIAL SEQUENCE
  Engineered IL-17A binding polypeptide
VDAKYAKEADHAALEIAELPNLTWDQWAAFINKLRDDPSQSSELLSEAKKLNDSQAPK

SEQ ID NO: 1152 - protein, 58 aa, ARTIFICIAL SEQUENCE
  Engineered IL-17A binding polypeptide
VDAKYAKEADTAAVEIAMLPNLTWWQWEAFIMKLRDDPSQSSELLSEAKKLNDSQAPK

SEQ ID NO: 1153 - protein, 58 aa, ARTIFICIAL SEQUENCE
  Engineered IL-17A binding polypeptide
VDAKYAKEADEAAYEIAFLPNLTWDQWAAFIYKLRDDPSQSSELLSEAKKLNDSQAPK

SEQ ID NO: 1154 - protein, 58 aa, ARTIFICIAL SEQUENCE
  Engineered IL-17A binding polypeptide
VDAKYAKEADSAAYEIAALPNLTWDQWWAFIQKLRDDPSQSSELLSEAKKLNDSQAPK

SEQ ID NO: 1155 - protein, 58 aa, ARTIFICIAL SEQUENCE
  Engineered IL-17A binding polypeptide
VDAKYAKEADNAAMEIAHLPNLTWDQWYAFIAKLRDDPSQSSELLSEAKKLNDSQAPK

SEQ ID NO: 1156 - protein, 58 aa, ARTIFICIAL SEQUENCE
  Engineered IL-17A binding polypeptide
VDAKYAKEADKAAFEIAALPNLTWVQWMAFIAKLRDDPSQSSELLSEAKKLNDSQAPK

SEQ ID NO: 1157 - protein, 58 aa, ARTIFICIAL SEQUENCE
  Engineered IL-17A binding polypeptide
VDAKYAKEADDAAVEIAHLPNLTWDQWEAFIFKLRDDPSQSSELLSEAKKLNDSQAPK

SEQ ID NO: 1158 - protein, 58 aa, ARTIFICIAL SEQUENCE
  Engineered IL-17A binding polypeptide
VDAKYAKEADFAALEIASLPNLTWAQWYAFINKLRDDPSQSSELLSEAKKLNDSQAPK

SEQ ID NO: 1159 - protein, 58 aa, ARTIFICIAL SEQUENCE
  Engineered IL-17A binding polypeptide
VDAKYAKEADHAAMEIAELPNLTWLQWHAFIAKLRDDPSQSSELLSEAKKLNDSQAPK

SEQ ID NO: 1160 - protein, 58 aa, ARTIFICIAL SEQUENCE
  Engineered IL-17A binding polypeptide
VDAKYAKEADHAAVEIANLPNLTWDQWHAFISKLRDDPSQSSELLSEAKKLNDSQAPK

SEQ ID NO: 1161 - protein, 58 aa, ARTIFICIAL SEQUENCE
  Engineered IL-17A binding polypeptide
VDAKYAKEADKAAFEIAFLPNLTWDQWDAFIAKLRDDPSQSSELLSEAKKLNDSQAPK

SEQ ID NO: 1162 - protein, 58 aa, ARTIFICIAL SEQUENCE
  Engineered IL-17A binding polypeptide
VDAKYAKEADLAAFEIALLPNLTWEQWFAFITKLRDDPSQSSELLSEAKKLNDSQAPK

SEQ ID NO: 1163 - protein, 58 aa, ARTIFICIAL SEQUENCE
  Engineered IL-17A binding polypeptide
VDAKYAKEADSAAMEIAVLPNLTWDQWFAFIMKLRDDPSQSSELLSEAKKLNDSQAPK

SEQ ID NO: 1164 - protein, 58 aa, ARTIFICIAL SEQUENCE
  Engineered IL-17A binding polypeptide
VDAKYAKEADAAAAEIADLPNLTWIQWDAFIHKLRDDPSQSSELLSEAKKLNDSQAPK

SEQ ID NO: 1165 - protein, 58 aa, ARTIFICIAL SEQUENCE
  Engineered IL-17A binding polypeptide
VDAKYAKEADFAAYEIADLPNLTWYQWHAFIQKLRDDPSQSSELLSEAKKLNDSQAPK

SEQ ID NO: 1166 - protein, 58 aa, ARTIFICIAL SEQUENCE
  Engineered IL-17A binding polypeptide
VDAKYAKEADQAAYEIADLPNLTWDQWDAFILKLRDDPSQSSELLSEAKKLNDSQAPK

SEQ ID NO: 1167 - protein, 58 aa, ARTIFICIAL SEQUENCE
  Engineered IL-17A binding polypeptide
VDAKYAKEADFAAMEIADLPNLTWDQWWAFITKLRDDPSQSSELLSEAKKLNDSQAPK

SEQ ID NO: 1168 - protein, 58 aa, ARTIFICIAL SEQUENCE
  Engineered IL-17A binding polypeptide
VDAKYAKEADMAAFEIAFLPNLTWDQWYAFIQKLRDDPSQSSELLSEAKKLNDSQAPK

SEQ ID NO: 1169 - protein, 58 aa, ARTIFICIAL SEQUENCE
  Engineered IL-17A binding polypeptide
VDAKYAKEADKAAVEIADLPNLTWDQWQAFIQKLRDDPSQSSELLSEAKKLNDSQAPK

SEQ ID NO: 1170 - protein, 58 aa, ARTIFICIAL SEQUENCE
  Engineered IL-17A binding polypeptide
VDAKYAKEADDAAIEIADLPNLTWDQWEAFILKLRDDPSQSSELLSEAKKLNDSQAPK

SEQ ID NO: 1171 - protein, 58 aa, ARTIFICIAL SEQUENCE
  Engineered IL-17A binding polypeptide
VDAKYAKEADVAAVEIAELPNLTWDQWWAFIDKLRDDPSQSSELLSEAKKLNDSQAPK

SEQ ID NO: 1172 - protein, 58 aa, ARTIFICIAL SEQUENCE
  Engineered IL-17A binding polypeptide
VDAKYAKEADQAAMEIAALPNLTWDQWDAFIGKLRDDPSQSSELLSEAKKLNDSQAPK

SEQ ID NO: 1173 - protein, 58 aa, ARTIFICIAL SEQUENCE
  Engineered IL-17A binding polypeptide
VDAKYAKEADAAAVEIAYLPNLTWDQWFAFIMKLRDDPSQSSELLSEAKKLNDSQAPK

SEQ ID NO: 1174 - protein, 58 aa, ARTIFICIAL SEQUENCE
  Engineered IL-17A binding polypeptide
VDAKYAKEADNAAMEIAELPNLTWIQWYAFINKLRDDPSQSSELLSEAKKLNDSQAPK

SEQ ID NO: 1175 - protein, 58 aa, ARTIFICIAL SEQUENCE
  Engineered IL-17A binding polypeptide
VDAKYAKEADQAAYEIASLPNLTWDQWLAFIDKLRDDPSQSSELLSEAKKLNDSQAPK

SEQ ID NO: 1176 - protein, 58 aa, ARTIFICIAL SEQUENCE
  Engineered IL-17A binding polypeptide
VDAKYAKEADGAAMEIAELPNLTWDQWEAFISKLRDDPSQSSELLSEAKKLNDSQAPK

SEQ ID NO: 1177 - protein, 58 aa, ARTIFICIAL SEQUENCE
  Engineered IL-17A binding polypeptide
VDAKYAKEADIAAVEIAGLPNLTWDQWFAFIGKLRDDPSQSSELLSEAKKLNDSQAPK

SEQ ID NO: 1178 - protein, 58 aa, ARTIFICIAL SEQUENCE
  Engineered IL-17A binding polypeptide
VDAKYAKEADTAALEIASLPNLTWDQWEAFIDKLRDDPSQSSELLSEAKKLNDSQAPK

SEQ ID NO: 1179 - protein, 58 aa, ARTIFICIAL SEQUENCE
  Engineered IL-17A binding polypeptide
VDAKYAKEADAAAFEIAALPNLTWFQWFAFIHKLRDDPSQSSELLSEAKKLNDSQAPK

SEQ ID NO: 1180 - protein, 58 aa, ARTIFICIAL SEQUENCE
  Engineered IL-17A binding polypeptide
VDAKYAKEADHAAMEIAMLPNLTWDQWFAFIAKLRDDPSQSSELLSEAKKLNDSQAPK

SEQ ID NO: 1181 - protein, 58 aa, ARTIFICIAL SEQUENCE
  Engineered IL-17A binding polypeptide
VDAKYAKEADRAAFEIAELPNLTWDQWEAFIGKLRDDPSQSSELLSEAKKLNDSQAPK

SEQ ID NO: 1182 - protein, 58 aa, ARTIFICIAL SEQUENCE
  Engineered IL-17A binding polypeptide
VDAKYAKEADSAAMEIADLPNLTWDQWLAFIDKLRDDPSQSSELLSEAKKLNDSQAPK

SEQ ID NO: 1183 - protein, 58 aa, ARTIFICIAL SEQUENCE
  Engineered IL-17A binding polypeptide
VDAKYAKEADTAAVEIAALPNLTWDQWQAFILKLRDDPSQSSELLSEAKKLNDSQAPK

SEQ ID NO: 1184 - protein, 58 aa, ARTIFICIAL SEQUENCE
  Engineered IL-17A binding polypeptide
VDAKYAKEADNAAYEIALLPNLTWDQWFAFIQKLRDDPSQSSELLSEAKKLNDSQAPK

SEQ ID NO: 1185 - protein, 58 aa, ARTIFICIAL SEQUENCE
  Engineered IL-17A binding polypeptide
VDAKYAKEADAAAFEIAELPNLTWLQWHAFINKLRDDPSQSSELLSEAKKLNDSQAPK

SEQ ID NO: 1186 - protein, 58 aa, ARTIFICIAL SEQUENCE
  Engineered IL-17A binding polypeptide
VDAKYAKEADSAALEIAGLPNLTWVQWWAFIGKLRDDPSQSSELLSEAKKLNDSQAPK

SEQ ID NO: 1187 - protein, 58 aa, ARTIFICIAL SEQUENCE
  Engineered IL-17A binding polypeptide
VDAKYAKEADWAAVEIANLPNLTWDQWDAFIDKLRDDPSQSSELLSEAKKLNDSQAPK

SEQ ID NO: 1188 - protein, 58 aa, ARTIFICIAL SEQUENCE
  Engineered IL-17A binding polypeptide
VDAKYAKEADKAALEIAQLPNLTWDQWWAFINKLRDDPSQSSELLSEAKKLNDSQAPK

SEQ ID NO: 1189 - protein, 58 aa, ARTIFICIAL SEQUENCE
  Engineered IL-17A binding polypeptide
VDAKYAKEADMAAVEIALLPNLTWDQWWAFISKLRDDPSQSSELLSEAKKLNDSQAPK

SEQ ID NO: 1190 - protein, 58 aa, ARTIFICIAL SEQUENCE
  Engineered IL-17A binding polypeptide
VDAKYAKEADVAAVEIALLPNLTWDQWEAFINKLRDDPSQSSELLSEAKKLNDSQAPK

SEQ ID NO: 1191 - protein, 58 aa, ARTIFICIAL SEQUENCE
  Engineered IL-17A binding polypeptide
VDAKYAKEADNAAFEIAFLPNLTWDQWWAFISKLRDDPSQSSELLSEAKKLNDSQAPK

SEQ ID NO: 1192 - protein, 58 aa, ARTIFICIAL SEQUENCE
  Engineered IL-17A binding polypeptide
VDAKYAKEADAAAMEIAVLPNLTWDQWWAFIDKLRDDPSQSSELLSEAKKLNDSQAPK

SEQ ID NO: 1193 - protein, 58 aa, ARTIFICIAL SEQUENCE
  Engineered IL-17A binding polypeptide
VDAKYAKEADIAAFEIAALPNLTWEQWWAFIWKLRDDPSQSSELLSEAKKLNDSQAPK

SEQ ID NO: 1194 - protein, 58 aa, ARTIFICIAL SEQUENCE
  Engineered IL-17A binding polypeptide
VDAKYAKEADRAAVEIALLPNLTWDQWHAFIQKLRDDPSQSSELLSEAKKLNDSQAPK

SEQ ID NO: 1195 - protein, 58 aa, ARTIFICIAL SEQUENCE
  Engineered IL-17A binding polypeptide
VDAKYAKEADAAAYEIAYLPNLTWIQWDAFIHKLRDDPSQSSELLSEAKKLNDSQAPK

SEQ ID NO: 1196 - protein, 58 aa, ARTIFICIAL SEQUENCE
  Engineered IL-17A binding polypeptide
VDAKYAKEADNAAIEIAELPNLTWDQWAAFIMKLRDDPSQSSELLSEAKKLNDSQAPK

SEQ ID NO: 1197 - protein, 58 aa, ARTIFICIAL SEQUENCE
  Engineered IL-17A binding polypeptide
VDAKYAKEADGAAMEIAGLPNLTWDQWFAFIMKLRDDPSQSSELLSEAKKLNDSQAPK

SEQ ID NO: 1198 - protein, 58 aa, ARTIFICIAL SEQUENCE
  Engineered IL-17A binding polypeptide
VDAKYAKEADWAAMEIALLPNLTWDQWEAFILKLRDDPSQSSELLSEAKKLNDSQAPK

SEQ ID NO: 1199 - protein, 58 aa, ARTIFICIAL SEQUENCE
  Engineered IL-17A binding polypeptide
VDAKYAKEADNAAMEIAALPNLTWEQWDAFIRKLRDDPSQSSELLSEAKKLNDSQAPK

SEQ ID NO: 1200 - protein, 58 aa, ARTIFICIAL SEQUENCE
  Engineered IL-17A binding polypeptide
VDAKYAKEHDYAWFEIWALPNLTWDQATAFIRKLNDDPSQSSELLSEAKKLNDSQAPK

SEQ ID NO: 1201 - protein, 58 aa, ARTIFICIAL SEQUENCE
  Engineered IL-17A binding polypeptide
VDAKYAKEMNRAQIEIWLLPNLTWHQQHAFIQKLIDDPSQSSELLSEAKKLNDSQAPK

SEQ ID NO: 1202 - protein, 58 aa, ARTIFICIAL SEQUENCE
  Engineered IL-17A binding polypeptide
VDAKYAKEADDAWWEIWALPNLTHAQGKAFIVKLLDDPSQSSELLSEAKKLNDSQAPK

SEQ ID NO: 1203 - protein, 58 aa, ARTIFICIAL SEQUENCE
  Engineered IL-17A binding polypeptide
VDAKYAKEAGDAQLEIWFLPNLTWAQSNAFIRKLIDDPSQSSELLSEAKKLNDSQAPK

SEQ ID NO: 1204 - protein, 58 aa, ARTIFICIAL SEQUENCE
  Engineered IL-17A binding polypeptide
VDAKYAKEGDQAAMEIAELPNLTWDQWFAFILKLRDDPSQSSELLSEAKKLNDSQAPK

SEQ ID NO: 1205 - protein, 58 aa, ARTIFICIAL SEQUENCE
  Engineered IL-17A binding polypeptide
VDAKYAKEADDAAVEIAALPNLTYDQWRAFIAKLRDDPSQSSELLSEAKKLNDSQAPK

SEQ ID NO: 1206 - protein, 58 aa, ARTIFICIAL SEQUENCE
  Engineered IL-17A binding polypeptide
VDAKYAKEADQAAMEIATLPNLTWDQWFAFIAKLRDDPSQSSELLSEAKKLNDSQAPK

SEQ ID NO: 1207 - protein, 58 aa, ARTIFICIAL SEQUENCE
  Engineered IL-17A binding polypeptide
VDAKYAKEADNAALEIADLPNLTWVQWNAFIQKLRDDPSQSSELLSEAKKLNDSQAPK

SEQ ID NO: 1208 - protein, 58 aa, ARTIFICIAL SEQUENCE
  Engineered IL-17A binding polypeptide
VDAKYAKEADDAAFEIAALPNLTARQWYAFISKLRDDPSQSSELLSEAKKLNDSQAPK

SEQ ID NO: 1209 - protein, 58 aa, ARTIFICIAL SEQUENCE
  Engineered IL-17A binding polypeptide
VDAKYAKETTYAWFEIWSLPNLTWDQQIAFIQKLNDDPSQSSELLSEAKKLNDSQAPK

SEQ ID NO: 1210 - protein, 58 aa, ARTIFICIAL SEQUENCE
  Engineered IL-17A binding polypeptide
VDAKYAKEADYAWFEIWSLPNLTYTQQSAFIRKLNDDPSQSSELLSEAKKLNDSQAPK

SEQ ID NO: 1211 - protein, 58 aa, ARTIFICIAL SEQUENCE
  Engineered IL-17A binding polypeptide
VDAKYAKEYDFAWFEIWLLPNLTRDQQSAFIHKLNDDPSQSSELLSEAKKLNDSQAPK

SEQ ID NO: 1212 - protein, 58 aa, ARTIFICIAL SEQUENCE
  Engineered IL-17A binding polypeptide
VDAKYAKEADEAWFEIWLLPNLTRSQASAFITKLNDDPSQSSELLSEAKKLNDSQAPK

SEQ ID NO: 1213 - protein, 58 aa, ARTIFICIAL SEQUENCE
  Engineered IL-17A binding polypeptide
VDAKYAKEADFAWFEIWALPNLTHDQSVAFIRKLNDDPSQSSELLSEAKKLNDSQAPK

SEQ ID NO: 1214 - protein, 58 aa, ARTIFICIAL SEQUENCE
  Engineered IL-17A binding polypeptide
VDAKYAKEMDNAQWEIWLLPNLTWAQQHAFIGKLIDDPSQSSELLSEAKKLNDSQAPK

SEQ ID NO: 1215 - protein, 58 aa, ARTIFICIAL SEQUENCE
  Engineered IL-17A binding polypeptide
VDAKYAKEMDDAWWEIWDLPNLTYYQQRAFIVKLVDDPSQSSELLSEAKKLNDSQAPK

SEQ ID NO: 1216 - protein, 58 aa, ARTIFICIAL SEQUENCE
  Engineered IL-17A binding polypeptide
VDAKYAKEWGEAQLEIWLLPNLTWWQGHAFIQKLLDDPSQSSELLSEAKKLNDSQAPK

SEQ ID NO: 1217 - protein, 60 aa, ARTIFICIAL SEQUENCE
  Engineered IL-17A binding polypeptide
AEAKYAKEADQAAMEIATLPNLTWDQWFAFIAKLRDDPSQSSELLSEAKKLNDSQAPKVD

SEQ ID NO: 1218 - protein, 58 aa, ARTIFICIAL SEQUENCE
  Engineered IL-17A binding polypeptide
AEAKYAKEADDAAVEIADLPNLTWDQWYAFISKLRDDPSQSSELLSEAKKLNDSQAPK

SEQ ID NO: 1219 - protein, 58 aa, ARTIFICIAL SEQUENCE
  Engineered IL-17A binding polypeptide
AEAKYAKEADDAAVEIASLPNLTWDQWYAFIQKLRDDPSQSSELLSEAKKLNDSQAPK

SEQ ID NO: 1220 - protein, 58 aa, ARTIFICIAL SEQUENCE
  Engineered IL-17A binding polypeptide
AEAKYAKEADDAAVEIAALPNLTWDQWFAFISKLRDDPSQSSELLSEAKKLNDSQAPK

SEQ ID NO: 1221 - protein, 58 aa, ARTIFICIAL SEQUENCE
  Engineered IL-17A binding polypeptide
AEAKYAKEADQAAVEIADLPNLTWAQWYAFIQKLRDDPSQSSELLSEAKKLNDSQAPK

SEQ ID NO: 1222 - protein, 58 aa, ARTIFICIAL SEQUENCE
  Engineered IL-17A binding polypeptide
AEAKYAKEADDAAVEIASLPNLTWAQWYAFIQKLRDDPSQSSELLSEAKKLNDSQAPK

SEQ ID NO: 1223 - protein, 58 aa, ARTIFICIAL SEQUENCE
  Engineered Taq polymerase binding polypeptide
VDAKYAKELGWATWEIFNLPNLTGVQVKAFIDKLRDDPSQSSELLSEAKKLNDSQAPK

SEQ ID NO: 1224 - protein, 46 aa, ARTIFICIAL SEQUENCE
  Engineered albumin binding polypeptide
LAEAKEAANAELDSYGVSDFYKRLIDKAKTVEGVEALKDAILAALP

SEQ ID NO: 1225 - protein, 49 aa, ARTIFICIAL SEQUENCE
  Engineered albumin binding polypeptide
GSSLAEAKEAANAELDSYGVSDFYKRLIDKAKTVEGVEALKDAILAALP

SEQ ID NO: 1226 - protein, 137 aa, HOMO SAPIENS
MIVKAGITIPRNPGCPNSEDKNFPRTVMVNLNIHNRNTNTNPKRSSDYYNRSTSPWNLHRNEDPERYPSVIWEAKCRHLGCINADGNVDYHMNSVPIQQEILVLRREPPHCPNSFRLEKILVSVGCTCVTPIVHHVA

SEQ ID NO: 1227 - protein, 133 aa, MUS MUSCULUS
AAIIPQSSACPNTEAKDFLQNVKVNLKVFNSLGAKVSSRRPSDYLNRSTSPWTLHRNEDPDRYPSVIWEAQCRHQRCVNAEGKLDHHMNSVLIQQEILVLKREPESCPFTFRVEKMLVGVGCTCVASIVRQAA

SEQ ID NO: 1228 - protein, 134 aa, HOMO SAPIENS
MRKIPKVGHTFFQKPESCPPVPGGSMKLDIGIINENQRVSMSRNIESRSTSPWNYTVTWDPNRYPSEVVQAQCRNLGCINAQGKEDISMNSVPIQQETLVVRRKHQGCSVSFQLEKVLVTVGCTCVTPVIHHVQ

SEQ ID NO: 1229 - protein, 155 aa, MACACA FASCICULARIS
MTPGKTSLVLLLLLLSLEAIVKAGIAIPRNSGCPNSEDKNFPRTVMVNLNIHNRNTSTNPKRSSDYYNRSTSPWNLHRNEDPERYPSVIWEAKCRHLGCVKADGNVDYHMNSVPIQQEILVLRREPRHCPNSFRLEKILVSVGCTCVTPIVHHVA

SEQ ID NO: 1230 - protein, 132 aa, MACACA MULATTA
GIAIPRNPGCPNSEDKTFPRTVMVNLNIHNRNTNTNPKRSSDYYNRSTSPWNLHRNEDPERYPSVIWEAKCRHLGCVNADGNVDYHMNSVPIQQEILVLRREPRHCPNSFRLEKILVSVGCTCVTPIVHHVA

SEQ ID NO: 1231 - protein, 451 aa, ARTIFICIAL SEQUENCE
  Engineered heavy chain of adalimumab
EVQLVESGGGLVQPGRSLRLSCAASGFTFDDYAMHWVRQAPGKGLEWVSAITWNSGHIDYADSVEGRFTISRDNAKNSLYLQMNSLRAEDTAVYYCAKVSYLSTASSLDYWGQGTLVTVSSASTKGPSVFPLAPSSKSTSGGTAALGCLVKDYFPEPVTVSWNSGALTSGVHTFPAVLQSSGLYSLSSVVTVPSSSLGTQTYICNVNHKPSNTKVDKKVEPKSCDKTHTCPPCPAPELLGGPSVFLFPPKPKDTLMISRTPEVTCVVVDVSHEDPEVKFNWYVDGVEVHNAKTKPREEQYNSTYRVVSVLTVLHQDWLNGKEYKCKVSNKALPAPIEKTISKAKGQPREPQVYTLPPSREEMTKNQVSLTCLVKGFYPSDIAVEWESNGQPENNYKTTPPVLDSDGSFFLYSKLTVDKSRWQQGNVFSCSVMHEALHNHYTQKSLSLSPGK

SEQ ID NO: 1232 - protein, 214 aa, ARTIFICIAL SEQUENCE
  Engineered light chain of adalimumab
DIQMTQSPSSLSASVGDRVTITCRASQGIRNYLAWYQQKPGKAPKLLIYAASTLQSGVPSRFSGSGSGTDFTLTISSLQPEDVATYYCQRYNRAPYTFGQGTKVEIKRTVAAPSVFIFPPSDEQLKSGTASVVCLLNNFYPREAKVQWKVDNALQSGNSQESVTEQDSKDSTYSLSSTLTLSKADYEKHKVYACEVTHQGLSSPVTKSFNRGEC

SEQ ID NO: 1233 - protein, 211 aa, ARTIFICIAL SEQUENCE
  Engineered IL-17A binding polypeptide
VDAKYAKEADQAAMEIATLPNLTWDQWFAFIAKLRDDPSQSSELLSEAKKLNDSQAPKGAPGGGGSGGGGSGGGGSGGGGSTSLAEAKEAANAELDSYGVSDFYKRLIDKAKTVEGVEALKDAILAALPGTGGGGSGGGGSGGGGSGGGGSPRVDAKYAKEADQAAMEIATLPNLTWDQWFAFIAKLRDDPSQSSELLSEAKKLNDSQAPK

SEQ ID NO: 1234 - protein, 201 aa, ARTIFICIAL SEQUENCE
  Engineered IL-17A binding polypeptide
VDAKYAKEADQAAMEIATLPNLTWDQWFAFIAKLRDDPSQSSELLSEAKKLNDSQAPKGAPGGGGSGGGGSGGGGSTSLAEAKEAANAELDSYGVSDFYKRLIDKAKTVEGVEALKDAILAALPGTGGGGSGGGGSGGGGSPRVDAKYAKEADQAAMEIATLPNLTWDQWFAFIAKLRDDPSQSSELLSEAKKLNDSQAPK

SEQ ID NO: 1235 - protein, 191 aa, ARTIFICIAL SEQUENCE
  Engineered IL-17A binding polypeptide
VDAKYAKEADQAAMEIATLPNLTWDQWFAFIAKLRDDPSQSSELLSEAKKLNDSQAPKGAPGGGGSGGGGSTSLAEAKEAANAELDSYGVSDFYKRLIDKAKTVEGVEALKDAILAALPGTGGGGSGGGGSPRVDAKYAKEADQAAMEIATLPNLTWDQWFAFIAKLRDDPSQSSELLSEAKKLNDSQAPK

SEQ ID NO: 1236 - protein, 211 aa, ARTIFICIAL SEQUENCE
  Engineered IL-17A binding polypeptide
VDAKYAKEADDAAVEIADLPNLTWDQWYAFISKLRDDPSQSSELLSEAKKLNDSQAPKGAPGGGGSGGGGSGGGGSGGGGSTSLAEAKEAANAELDSYGVSDFYKRLIDKAKTVEGVEALKDAILAALPGTGGGGSGGGGSGGGGSGGGGSPRVDAKYAKEADDAAVEIADLPNLTWDQWYAFISKLRDDPSQSSELLSEAKKLNDSQAPK

SEQ ID NO: 1237 - protein, 211 aa, ARTIFICIAL SEQUENCE
  Engineered IL-17A binding polypeptide
VDAKYAKEADDAAVEIASLPNLTWDQWYAFIQKLRDDPSQSSELLSEAKKLNDSQAPKGAPGGGGSGGGGSGGGGSGGGGSTSLAEAKEAANAELDSYGVSDFYKRLIDKAKTVEGVEALKDAILAALPGTGGGGSGGGGSGGGGSGGGGSPRVDAKYAKEADDAAVEIASLPNLTWDQWYAFIQKLRDDPSQSSELLSEAKKLNDSQAPK

SEQ ID NO: 1238 - protein, 175 aa, ARTIFICIAL SEQUENCE
  Engineered IL-17A binding polypeptide
VDAKYAKEADQAAMEIATLPNLTWDQWFAFIAKLRDDPSQSSELLSEAKKLNDSQAPKVDGSLAEAKEAANAELDSYGVSDFYKRLIDKAKTVEGVEALKDAILAALPGTGGGGSPRVDAKYAKEADQAAMEIATLPNLTWDQWFAFIAKLRDDPSQSSELLSEAKKLNDSQAPK

SEQ ID NO: 1239 - protein, 180 aa, ARTIFICIAL SEQUENCE
  Engineered IL-17A binding polypeptide
VDAKYAKEADQAAMEIATLPNLTWDQWFAFIAKLRDDPSQSSELLSEAKKLNDSQAPKVDGSLAEAKEAANAELDSYGVSDFYKRLIDKAKTVEGVEALKDAILAALPGTGGGGSGGGGSPRVDAKYAKEADQAAMEIATLPNLTWDQWFAFIAKLRDDPSQSSELLSEAKKLNDSQAPK

SEQ ID NO: 1240 - protein, 181 aa, ARTIFICIAL SEQUENCE
  Engineered IL-17A binding polypeptide
VDAKYAKEADQAAMEIATLPNLTWDQWFAFIAKLRDDPSQSSELLSEAKKLNDSQAPKGAPGGGGSTSLAEAKEAANAELDSYGVSDFYKRLIDKAKTVEGVEALKDAILAALPGTGGGGSPRVDAKYAKEADQAAMEIATLPNLTWDQWFAFIAKLRDDPSQSSELLSEAKKLNDSQAPK

SEQ ID NO: 1241 - protein, 186 aa, ARTIFICIAL SEQUENCE
  Engineered IL-17A binding polypeptide
VDAKYAKEADQAAMEIATLPNLTWDQWFAFIAKLRDDPSQSSELLSEAKKLNDSQAPKGAPGGGGSTSLAEAKEAANAELDSYGVSDFYKRLIDKAKTVEGVEALKDAILAALPGTGGGGSGGGGSPRVDAKYAKEADQAAMEIATLPNLTWDQWFAFIAKLRDDPSQSSELLSEAKKLNDSQAPK

SEQ ID NO: 1242 - protein, 175 aa, ARTIFICIAL SEQUENCE
  Engineered IL-17A binding polypeptide
AEAKYAKEADDAAVEIADLPNLTWDQWYAFISKLRDDPSQSSELLSEAKKLNDSQAPKVDGSLAEAKEAANAELDSYGVSDFYKRLIDKAKTVEGVEALKDAILAALPGTGGGGSPKAEAKYAKEADDAAVEIADLPNLTWDQWYAFISKLRDDPSQSSELLSEAKKLNDSQAPK

SEQ ID NO: 1243 - protein, 173 aa, ARTIFICIAL SEQUENCE
  Engineered IL-17A binding polypeptide
AEAKYAKEADDAAVEIADLPNLTWDQWYAFISKLRDDPSQSSELLSEAKKLNDSQAPKASGSLAEAKEAANAELDSYGVSDFYKRLIDKAKTVEGVEALKDAILAALPGTGGGGSAEAKYAKEADDAAVEIADLPNLTWDQWYAFISKLRDDPSQSSELLSEAKKLNDSQAPK

SEQ ID NO: 1244 - protein, 173 aa, ARTIFICIAL SEQUENCE
  Engineered IL-17A binding polypeptide
AEAKYAKEADDAAVEIASLPNLTWDQWYAFIQKLRDDPSQSSELLSEAKKLNDSQAPKASGSLAEAKEAANAELDSYGVSDFYKRLIDKAKTVEGVEALKDAILAALPGTGGGGSAEAKYAKEADDAAVEIASLPNLTWDQWYAFIQKLRDDPSQSSELLSEAKKLNDSQAPK

SEQ ID NO: 1245 - protein, 173 aa, ARTIFICIAL SEQUENCE
  Engineered IL-17A binding polypeptide
AEAKYAKEADDAAVEIAALPNLTWDQWFAFISKLRDDPSQSSELLSEAKKLNDSQAPKASGSLAEAKEAANAELDSYGVSDFYKRLIDKAKTVEGVEALKDAILAALPGTGGGGSAEAKYAKEADDAAVEIAALPNLTWDQWFAFISKLRDDPSQSSELLSEAKKLNDSQAPK

SEQ ID NO: 1246 - protein, 173 aa, ARTIFICIAL SEQUENCE
  Engineered IL-17A binding polypeptide
AEAKYAKEADQAAVEIADLPNLTWAQWYAFIQKLRDDPSQSSELLSEAKKLNDSQAPKASGSLAEAKEAANAELDSYGVSDFYKRLIDKAKTVEGVEALKDAILAALPGTGGGGSAEAKYAKEADQAAVEIADLPNLTWAQWYAFIQKLRDDPSQSSELLSEAKKLNDSQAPK

SEQ ID NO: 1247 - protein, 173 aa, ARTIFICIAL SEQUENCE
  Engineered IL-17A binding polypeptide
AEAKYAKEADDAAVEIASLPNLTWAQWYAFIQKLRDDPSQSSELLSEAKKLNDSQAPKASGSLAEAKEAANAELDSYGVSDFYKRLIDKAKTVEGVEALKDAILAALPGTGGGGSAEAKYAKEADDAAVEIASLPNLTWAQWYAFIQKLRDDPSQSSELLSEAKKLNDSQAPK

SEQ ID NO: 1248 - DNA, 147 bp, ARTIFICIAL SEQUENCE
  Library oligonucleotide
  misc_feature (39)..(47): n is a, c, g, or t
  misc_feature (51)..(56): n is a, c, g, or t
  misc_feature (63)..(68): n is a, c, g, or t
  misc_feature (84)..(89): n is a, c, g, or t
  misc_feature (93)..(98): n is a, c, g, or t
  misc_feature (108)..(110): n is a, c, g, or t
  misc_feature (117)..(119): n is a, c, g, or t
aaataaatctcgaggtagatgccaaatacgccaaagaannnnnnnnngcgnnnnnngagatcnnnnnnttacctaacttaaccnnnnnncaannnnnngccttcatcnnnaaattannngatgacccaagccagagctcattattta

SEQ ID NO: 1249 - DNA, 147 bp, ARTIFICIAL SEQUENCE
  Library oligonucleotide
  misc_feature (39)..(47): n is a, c, g, or t
  misc_feature (51)..(56): n is a, c, g, or t
  misc_feature (63)..(68): n is a, c, g, or t
  misc_feature (84)..(89): n is a, c, g, or t
  misc_feature (93)..(98): n is a, c, g, or t
  misc_feature (108)..(110): n is a, c, g, or t
  misc_feature (117)..(119): n is a, c, g, or t
aaataaatctcgaggtagatgcmaaatacgccaaagarnnnnnnnnngcgnnnnnngagatynnnnnnytrccyaacytmaccnnnnnncarnnnnnngccttcatcnnnaaattannngatgacccaagccagagctcattattta

SEQ ID NO: 1250 - protein, 58 aa, ARTIFICIAL SEQUENCE
  Engineered IL-17A binding polypeptide
  misc_feature (9)..(9): Xaa can be any naturally occurring amino acid
  misc_feature (11)..(11): Xaa can be any naturally occurring amino acid
  misc_feature (13)..(14): Xaa can be any naturally occurring amino acid
  misc_feature (17)..(18): Xaa can be any naturally occurring amino acid
  misc_feature (23)..(25): Xaa can be any naturally occurring amino acid
  misc_feature (27)..(28): Xaa can be any naturally occurring amino acid
  misc_feature (32)..(33): Xaa can be any naturally occurring amino acid
  misc_feature (35)..(36): Xaa can be any naturally occurring amino acid
ADNNFNKEXDXAXXEIXXLPNLXXXQXXAFIXXLXXDPSQSANLLSEAKKLNESQAPK

SEQ ID NO: 1251 - protein, 58 aa, ARTIFICIAL SEQUENCE
  Engineered IL-17A binding polypeptide
  misc_feature (9)..(9): Xaa can be any naturally occurring amino acid
  misc_feature (11)..(11): Xaa can be any naturally occurring amino acid
  misc_feature (13)..(14): Xaa can be any naturally occurring amino acid
  misc_feature (17)..(18): Xaa can be any naturally occurring amino acid
  misc_feature (23)..(25): Xaa can be any naturally occurring amino acid
  misc_feature (27)..(28): Xaa can be any naturally occurring amino acid
  misc_feature (32)..(33): Xaa can be any naturally occurring amino acid
  misc_feature (35)..(36): Xaa can be any naturally occurring amino acid
ADNKFNKEXDXAXXEIXXLPNLXXXQXXAFIXXLXXDPSQSANLLAEAKKLNDAQAPK

SEQ ID NO: 1252 - protein, 58 aa, ARTIFICIAL SEQUENCE
  Engineered IL-17A binding polypeptide
  misc_feature (9)..(9): Xaa can be any naturally occurring amino acid
  misc_feature (11)..(11): Xaa can be any naturally occurring amino acid
  misc_feature (13)..(14): Xaa can be any naturally occurring amino acid
  misc_feature (17)..(18): Xaa can be any naturally occurring amino acid
  misc_feature (23)..(25): Xaa can be any naturally occurring amino acid
  misc_feature (27)..(28): Xaa can be any naturally occurring amino acid
  misc_feature (32)..(33): Xaa can be any naturally occurring amino acid
  misc_feature (35)..(36): Xaa can be any naturally occurring amino acid
ADNKFNKEXDXAXXEIXXLPNLXXXQXXAFIXXLXXDPSVSKEILAEAKKLNDAQAPK

SEQ ID NO: 1253 - protein, 61 aa, ARTIFICIAL SEQUENCE
  Engineered IL-17A binding polypeptide
  misc_feature (12)..(12): Xaa can be any naturally occurring amino acid
  misc_feature (14)..(14): Xaa can be any naturally occurring amino acid
  misc_feature (16)..(17): Xaa can be any naturally occurring amino acid
  misc_feature (20)..(21): Xaa can be any naturally occurring amino acid
  misc_feature (26)..(28): Xaa can be any naturally occurring amino acid
  misc_feature (30)..(31): Xaa can be any naturally occurring amino acid
  misc_feature (35)..(36): Xaa can be any naturally occurring amino acid
  misc_feature (38)..(39): Xaa can be any naturally occurring amino acid
ADAQQNNFNKEXDXAXXEIXXLPNLXXXQXXAFIXXLXXDPSQSTNVLGEAKKLNESQAPK

SEQ ID NO: 1254 - protein, 56 aa, ARTIFICIAL SEQUENCE
  Engineered IL-17A binding polypeptide
  misc_feature (7)..(7): Xaa can be any naturally occurring amino acid
  misc_feature (9)..(9): Xaa can be any naturally occurring amino acid
  misc_feature (11)..(12): Xaa can be any naturally occurring amino acid
  misc_feature (15)..(16): Xaa can be any naturally occurring amino acid
  misc_feature (21)..(23): Xaa can be any naturally occurring amino acid
  misc_feature (25)..(26): Xaa can be any naturally occurring amino acid
  misc_feature (30)..(31): Xaa can be any naturally occurring amino acid
  misc_feature (33)..(34): Xaa can be any naturally occurring amino acid
AQHDEEXDXAXXEIXXLPNLXXXQXXAFIXXLXXDPSQSANVLGEAQKLNDSQAPK

SEQ ID NO: 1255 - protein, 58 aa, ARTIFICIAL SEQUENCE
  Engineered IL-17A binding polypeptide
  misc_feature (9)..(9): Xaa can be any naturally occurring amino acid
  misc_feature (11)..(11): Xaa can be any naturally occurring amino acid
  misc_feature (13)..(14): Xaa can be any naturally occurring amino acid
  misc_feature (17)..(18): Xaa can be any naturally occurring amino acid
  misc_feature (23)..(25): Xaa can be any naturally occurring amino acid
  misc_feature (27)..(28): Xaa can be any naturally occurring amino acid
  misc_feature (32)..(33): Xaa can be any naturally occurring amino acid
  misc_feature (35)..(36): Xaa can be any naturally occurring amino acid
VDNKFNKEXDXAXXEIXXLPNLXXXQXXAFIXXLXXDPSQSANLLAEAKKLNDAQAPK

SEQ ID NO: 1256 - protein, 58 aa, ARTIFICIAL SEQUENCE
  Engineered IL-17A binding polypeptide
  misc_feature (9)..(9): Xaa can be any naturally occurring amino acid
  misc_feature (11)..(11): Xaa can be any naturally occurring amino acid
  misc_feature (13)..(14): Xaa can be any naturally occurring amino acid
  misc_feature (17)..(18): Xaa can be any naturally occurring amino acid
  misc_feature (23)..(25): Xaa can be any naturally occurring amino acid
  misc_feature (27)..(28): Xaa can be any naturally occurring amino acid
  misc_feature (32)..(33): Xaa can be any naturally occurring amino acid
  misc_feature (35)..(36): Xaa can be any naturally occurring amino acid
AEAKYAKEXDXAXXEIXXLPNLXXXQXXAFIXXLXXDPSESSELLSEAKKLNKSQAPK

SEQ ID NO: 1257 - protein, 58 aa, ARTIFICIAL SEQUENCE
  Engineered IL-17A binding polypeptide
  misc_feature (9)..(9): Xaa can be any naturally occurring amino acid
  misc_feature (11)..(11): Xaa can be any naturally occurring amino acid
  misc_feature (13)..(14): Xaa can be any naturally occurring amino acid
  misc_feature (17)..(18): Xaa can be any naturally occurring amino acid
  misc_feature (23)..(25): Xaa can be any naturally occurring amino acid
  misc_feature (27)..(28): Xaa can be any naturally occurring amino acid
  misc_feature (32)..(33): Xaa can be any naturally occurring amino acid
  misc_feature (35)..(36): Xaa can be any naturally occurring amino acid
VDAKYAKEXDXAXXEIXXLPNLXXXQXXAFIXXLXXDPSQSSELLAEAKKLNDAQAPK

SEQ ID NO: 1258 - protein, 58 aa, ARTIFICIAL SEQUENCE
  Engineered IL-17A binding polypeptide
  misc_feature (9)..(9): Xaa can be any naturally occurring amino acid
  misc_feature (11)..(11): Xaa can be any naturally occurring amino acid
  misc_feature (13)..(14): Xaa can be any naturally occurring amino acid
  misc_feature (17)..(18): Xaa can be any naturally occurring amino acid
  misc_feature (23)..(25): Xaa can be any naturally occurring amino acid
  misc_feature (27)..(28): Xaa can be any naturally occurring amino acid
  misc_feature (32)..(33): Xaa can be any naturally occurring amino acid
  misc_feature (35)..(36): Xaa can be any naturally occurring amino acid
VDAKYAKEXDXAXXEIXXLPNLXXXQXXAFIXXLXXDPSQSSELLAEAKKLNDSQAPK

SEQ ID NO: 1259 - protein, 58 aa, ARTIFICIAL SEQUENCE
  Engineered IL-17A binding polypeptide
  misc_feature (9)..(9): Xaa can be any naturally occurring amino acid
  misc_feature (11)..(11): Xaa can be any naturally occurring amino acid
  misc_feature (13)..(14): Xaa can be any naturally occurring amino acid
  misc_feature (17)..(18): Xaa can be any naturally occurring amino acid
  misc_feature (23)..(25): Xaa can be any naturally occurring amino acid
  misc_feature (27)..(28): Xaa can be any naturally occurring amino acid
  misc_feature (32)..(33): Xaa can be any naturally occurring amino acid
  misc_feature (35)..(36): Xaa can be any naturally occurring amino acid
AEAKYAKEXDXAXXEIXXLPNLXXXQXXAFIXXLXXDPSQSSELLSEAKKLNDSQAPK

SEQ ID NO: 1260 - protein, 57 aa, ARTIFICIAL SEQUENCE
  Engineered IL-17A binding polypeptide
  misc_feature (9)..(9): Xaa can be any naturally occurring amino acid
  misc_feature (11)..(11): Xaa can be any naturally occurring amino acid
  misc_feature (13)..(14): Xaa can be any naturally occurring amino acid
  misc_feature (17)..(18): Xaa can be any naturally occurring amino acid
  misc_feature (23)..(25): Xaa can be any naturally occurring amino acid
  misc_feature (27)..(28): Xaa can be any naturally occurring amino acid
  misc_feature (32)..(33): Xaa can be any naturally occurring amino acid
  misc_feature (35)..(36): Xaa can be any naturally occurring amino acid
AEAKYAKEXDXAXXEIXXLPNLXXXQXXAFIXXLXXDPSQSSELLSEAKKLNDSQAP

SEQ ID NO: 1261 - protein, 58 aa, ARTIFICIAL SEQUENCE
  Engineered IL-17A binding polypeptide
  misc_feature (9)..(9): Xaa can be any naturally occurring amino acid
  misc_feature (11)..(11): Xaa can be any naturally occurring amino acid
  misc_feature (13)..(14): Xaa can be any naturally occurring amino acid
  misc_feature (17)..(18): Xaa can be any naturally occurring amino acid
  misc_feature (23)..(25): Xaa can be any naturally occurring amino acid
  misc_feature (27)..(28): Xaa can be any naturally occurring amino acid
  misc_feature (32)..(33): Xaa can be any naturally occurring amino acid
  misc_feature (35)..(36): Xaa can be any naturally occurring amino acid
AEAKYAKEXDXAXXEIXXLPNLXXXQXXAFIXXLXXDPSQSSELLSEAKKLNDAQAPK

SEQ ID NO: 1262 - protein, 57 aa, ARTIFICIAL SEQUENCE
  Engineered IL-17A binding polypeptide
  misc_feature (9)..(9): Xaa can be any naturally occurring amino acid
  misc_feature (11)..(11): Xaa can be any naturally occurring amino acid
  misc_feature (13)..(14): Xaa can be any naturally occurring amino acid
  misc_feature (17)..(18): Xaa can be any naturally occurring amino acid
  misc_feature (23)..(25): Xaa can be any naturally occurring amino acid
  misc_feature (27)..(28): Xaa can be any naturally occurring amino acid
  misc_feature (32)..(33): Xaa can be any naturally occurring amino acid
  misc_feature (35)..(36): Xaa can be any naturally occurring amino acid
AEAKYAKEXDXAXXEIXXLPNLXXXQXXAFIXXLXXDPSQSSELLSEAKKLNDAQAP

SEQ ID NO: 1263 - protein, 58 aa, ARTIFICIAL SEQUENCE
  Engineered IL-17A binding polypeptide
  misc_feature (9)..(9): Xaa can be any naturally occurring amino acid
  misc_feature (11)..(11): Xaa can be any naturally occurring amino acid
  misc_feature (13)..(14): Xaa can be any naturally occurring amino acid
  misc_feature (17)..(18): Xaa can be any naturally occurring amino acid
  misc_feature (23)..(25): Xaa can be any naturally occurring amino acid
  misc_feature (27)..(28): Xaa can be any naturally occurring amino acid
  misc_feature (32)..(33): Xaa can be any naturally occurring amino acid
  misc_feature (35)..(36): Xaa can be any naturally occurring amino acid
AEAKFAKEXDXAXXEIXXLPNLXXXQXXAFIXXLXXDPSQSSELLSEAKKLNDSQAPK

SEQ ID NO: 1264 - protein, 57 aa, ARTIFICIAL SEQUENCE
  Engineered IL-17A binding polypeptide
  misc_feature (9)..(9): Xaa can be any naturally occurring amino acid
  misc_feature (11)..(11): Xaa can be any naturally occurring amino acid
  misc_feature (13)..(14): Xaa can be any naturally occurring amino acid
  misc_feature (17)..(18): Xaa can be any naturally occurring amino acid
  misc_feature (23)..(25): Xaa can be any naturally occurring amino acid
  misc_feature (27)..(28): Xaa can be any naturally occurring amino acid
  misc_feature (32)..(33): Xaa can be any naturally occurring amino acid
  misc_feature (35)..(36): Xaa can be any naturally occurring amino acid
AEAKFAKEXDXAXXEIXXLPNLXXXQXXAFIXXLXXDPSQSSELLSEAKKLNDSQAP

SEQ ID NO: 1265 - protein, 58 aa, ARTIFICIAL SEQUENCE
  Engineered IL-17A binding polypeptide
  misc_feature (9)..(9): Xaa can be any naturally occurring amino acid
  misc_feature (11)..(11): Xaa can be any naturally occurring amino acid
  misc_feature (13)..(14): Xaa can be any naturally occurring amino acid
  misc_feature (17)..(18): Xaa can be any naturally occurring amino acid
  misc_feature (23)..(25): Xaa can be any naturally occurring amino acid
  misc_feature (27)..(28): Xaa can be any naturally occurring amino acid
  misc_feature (32)..(33): Xaa can be any naturally occurring amino acid
  misc_feature (35)..(36): Xaa can be any naturally occurring amino acid
AEAKYAKEXDXAXXEIXXLPNLXXXQXXAFIXXLXXDPSQSSELLAEAKKLNDAQAPK

SEQ ID NO: 1266 - protein, 58 aa, ARTIFICIAL SEQUENCE
  Engineered IL-17A binding polypeptide
  misc_feature (9)..(9): Xaa can be any naturally occurring amino acid
  misc_feature (11)..(11): Xaa can be any naturally occurring amino acid
  misc_feature (13)..(14): Xaa can be any naturally occurring amino acid
  misc_feature (17)..(18): Xaa can be any naturally occurring amino acid
  misc_feature (23)..(25): Xaa can be any naturally occurring amino acid
  misc_feature (27)..(28): Xaa can be any naturally occurring amino acid
  misc_feature (32)..(33): Xaa can be any naturally occurring amino acid
  misc_feature (35)..(36): Xaa can be any naturally occurring amino acid
AEAKYAKEXDXAXXEIXXLPNLXXXQXXAFIXXLXXDPSQSSELLSEAKKLSESQAPK

SEQ ID NO: 1267 - protein, 57 aa, ARTIFICIAL SEQUENCE
  Engineered IL-17A binding polypeptide
  misc_feature (9)..(9): Xaa can be any naturally occurring amino acid
  misc_feature (11)..(11): Xaa can be any naturally occurring amino acid
  misc_feature (13)..(14): Xaa can be any naturally occurring amino acid
  misc_feature (17)..(18): Xaa can be any naturally occurring amino acid
  misc_feature (23)..(25): Xaa can be any naturally occurring amino acid
  misc_feature (27)..(28): Xaa can be any naturally occurring amino acid
  misc_feature (32)..(33): Xaa can be any naturally occurring amino acid
  misc_feature (35)..(36): Xaa can be any naturally occurring amino acid
AEAKYAKEXDXAXXEIXXLPNLXXXQXXAFIXXLXXDPSQSSELLSEAKKLSESQAP

SEQ ID NO: 1268 - protein, 58 aa, ARTIFICIAL SEQUENCE
  Engineered IL-17A binding polypeptide
  misc_feature (9)..(9): Xaa can be any naturally occurring amino acid
  misc_feature (11)..(11): Xaa can be any naturally occurring amino acid
  misc_feature (13)..(14): Xaa can be any naturally occurring amino acid
  misc_feature (17)..(18): Xaa can be any naturally occurring amino acid
  misc_feature (23)..(25): Xaa can be any naturally occurring amino acid
  misc_feature (27)..(28): Xaa can be any naturally occurring amino acid
  misc_feature (32)..(33): Xaa can be any naturally occurring amino acid
  misc_feature (35)..(36): Xaa can be any naturally occurring amino acid
AEAKFAKEXDXAXXEIXXLPNLXXXQXXAFIXXLXXDPSQSSELLSEAKKLSESQAPK

SEQ ID NO: 1269 - protein, 57 aa, ARTIFICIAL SEQUENCE
  Engineered IL-17A binding polypeptide
  misc_feature (9)..(9): Xaa can be any naturally occurring amino acid
  misc_feature (11)..(11): Xaa can be any naturally occurring amino acid
  misc_feature (13)..(14): Xaa can be any naturally occurring amino acid
  misc_feature (17)..(18): Xaa can be any naturally occurring amino acid
  misc_feature (23)..(25): Xaa can be any naturally occurring amino acid
  misc_feature (27)..(28): Xaa can be any naturally occurring amino acid
  misc_feature (32)..(33): Xaa can be any naturally occurring amino acid
  misc_feature (35)..(36): Xaa can be any naturally occurring amino acid
AEAKFAKEXDXAXXEIXXLPNLXXXQXXAFIXXLXXDPSQSSELLSEAKKLSESQAP

SEQ ID NO: 1270 - protein, 58 aa, ARTIFICIAL SEQUENCE
  Engineered IL-17A binding polypeptide
  misc_feature (9)..(9): Xaa can be any naturally occurring amino acid
  misc_feature (11)..(11): Xaa can be any naturally occurring amino acid
  misc_feature (13)..(14): Xaa can be any naturally occurring amino acid
  misc_feature (17)..(18): Xaa can be any naturally occurring amino acid
  misc_feature (23)..(25): Xaa can be any naturally occurring amino acid
  misc_feature (27)..(28): Xaa can be any naturally occurring amino acid
  misc_feature (32)..(33): Xaa can be any naturally occurring amino acid
  misc_feature (35)..(36): Xaa can be any naturally occurring amino acid
AEAKYAKEXDXAXXEIXXLPNLXXXQXXAFIXXLXXDPSQSSELLAEAKKLSEAQAPK

SEQ ID NO: 1271 - protein, 58 aa, ARTIFICIAL SEQUENCE
  Engineered IL-17A binding polypeptide
  misc_feature (9)..(9): Xaa can be any naturally occurring amino acid
  misc_feature (11)..(11): Xaa can be any naturally occurring amino acid
  misc_feature (13)..(14): Xaa can be any naturally occurring amino acid
  misc_feature (17)..(18): Xaa can be any naturally occurring amino acid
  misc_feature (23)..(25): Xaa can be any naturally occurring amino acid
  misc_feature (27)..(28): Xaa can be any naturally occurring amino acid
  misc_feature (32)..(33): Xaa can be any naturally occurring amino acid
  misc_feature (35)..(36): Xaa can be any naturally occurring amino acid
AEAKYAKEXDXAXXEIXXLPNLXXXQXXAFIXXLXXQPEQSSELLSEAKKLSESQAPK

SEQ ID NO: 1272 - protein, 58 aa, ARTIFICIAL SEQUENCE
  Engineered IL-17A binding polypeptide
  misc_feature (9)..(9): Xaa can be any naturally occurring amino acid
  misc_feature (11)..(11): Xaa can be any naturally occurring amino acid
  misc_feature (13)..(14): Xaa can be any naturally occurring amino acid
  misc_feature (17)..(18): Xaa can be any naturally occurring amino acid
  misc_feature (23)..(25): Xaa can be any naturally occurring amino acid
  misc_feature (27)..(28): Xaa can be any naturally occurring amino acid
  misc_feature (32)..(33): Xaa can be any naturally occurring amino acid
  misc_feature (35)..(36): Xaa can be any naturally occurring amino acid
AEAKYAKEXDXAXXEIXXLPNLXXXQXXAFIXXLXXDPSQSSELLSEAKKLESSQAPK

SEQ ID NO: 1273 - protein, 57 aa, ARTIFICIAL SEQUENCE
  Engineered IL-17A binding polypeptide
  misc_feature (9)..(9): Xaa can be any naturally occurring amino acid
  misc_feature (11)..(11): Xaa can be any naturally occurring amino acid
  misc_feature (13)..(14): Xaa can be any naturally occurring amino acid
  misc_feature (17)..(18): Xaa can be any naturally occurring amino acid
  misc_feature (23)..(25): Xaa can be any naturally occurring amino acid
  misc_feature (27)..(28): Xaa can be any naturally occurring amino acid
  misc_feature (32)..(33): Xaa can be any naturally occurring amino acid
  misc_feature (35)..(36): Xaa can be any naturally occurring amino acid
AEAKYAKEXDXAXXEIXXLPNLXXXQXXAFIXXLXXDPSQSSELLSEAKKLESSQAP

SEQ ID NO: 1274 - protein, 58 aa, ARTIFICIAL SEQUENCE
  Engineered IL-17A binding polypeptide
  misc_feature (9)..(9): Xaa can be any naturally occurring amino acid
  misc_feature (11)..(11): Xaa can be any naturally occurring amino acid
  misc_feature (13)..(14): Xaa can be any naturally occurring amino acid
  misc_feature (17)..(18): Xaa can be any naturally occurring amino acid
  misc_feature (23)..(25): Xaa can be any naturally occurring amino acid
  misc_feature (27)..(28): Xaa can be any naturally occurring amino acid
  misc_feature (32)..(33): Xaa can be any naturally occurring amino acid
  misc_feature (35)..(36): Xaa can be any naturally occurring amino acid
AEAKYAKEXDXAXXEIXXLPNLXXXQXXAFIXXLXXDPSQSSELLAEAKKLESAQAPK

SEQ ID NO: 1275 - protein, 58 aa, ARTIFICIAL SEQUENCE
  Engineered IL-17A binding polypeptide
  misc_feature (9)..(9): Xaa can be any naturally occurring amino acid
  misc_feature (11)..(11): Xaa can be any naturally occurring amino acid
  misc_feature (13)..(14): Xaa can be any naturally occurring amino acid
  misc_feature (17)..(18): Xaa can be any naturally occurring amino acid
  misc_feature (23)..(25): Xaa can be any naturally occurring amino acid
  misc_feature (27)..(28): Xaa can be any naturally occurring amino acid
  misc_feature (32)..(33): Xaa can be any naturally occurring amino acid
  misc_feature (35)..(36): Xaa can be any naturally occurring amino acid
AEAKYAKEXDXAXXEIXXLPNLXXXQXXAFIXXLXXQPEQSSELLSEAKKLESSQAPK

SEQ ID NO: 1276 - protein, 58 aa, ARTIFICIAL SEQUENCE
  Engineered IL-17A binding polypeptide
  misc_feature (9)..(9): Xaa can be any naturally occurring amino acid
  misc_feature (11)..(11): Xaa can be any naturally occurring amino acid
  misc_feature (13)..(14): Xaa can be any naturally occurring amino acid
  misc_feature (17)..(18): Xaa can be any naturally occurring amino acid
  misc_feature (23)..(25): Xaa can be any naturally occurring amino acid
  misc_feature (27)..(28): Xaa can be any naturally occurring amino acid
  misc_feature (32)..(33): Xaa can be any naturally occurring amino acid
  misc_feature (35)..(36): Xaa can be any naturally occurring amino acid
AEAKYAKEXDXAXXEIXXLPNLXXXQXXAFIXXLXXDPSQSSELLSEAKKLSDSQAPK

SEQ ID NO: 1277 - protein, 57 aa, ARTIFICIAL SEQUENCE
  Engineered IL-17A binding polypeptide
  misc_feature (9)..(9): Xaa can be any naturally occurring amino acid
  misc_feature (11)..(11): Xaa can be any naturally occurring amino acid
  misc_feature (13)..(14): Xaa can be any naturally occurring amino acid
  misc_feature (17)..(18): Xaa can be any naturally occurring amino acid
  misc_feature (23)..(25): Xaa can be any naturally occurring amino acid
  misc_feature (27)..(28): Xaa can be any naturally occurring amino acid
  misc_feature (32)..(33): Xaa can be any naturally occurring amino acid
  misc_feature (35)..(36): Xaa can be any naturally occurring amino acid
AEAKYAKEXDXAXXEIXXLPNLXXXQXXAFIXXLXXDPSQSSELLSEAKKLSDSQAP

SEQ ID NO: 1278 - protein, 58 aa, ARTIFICIAL SEQUENCE
  Engineered IL-17A binding polypeptide
  misc_feature (9)..(9): Xaa can be any naturally occurring amino acid
  misc_feature (11)..(11): Xaa can be any naturally occurring amino acid
  misc_feature (13)..(14): Xaa can be any naturally occurring amino acid
  misc_feature (17)..(18): Xaa can be any naturally occurring amino acid
  misc_feature (23)..(25): Xaa can be any naturally occurring amino acid
  misc_feature (27)..(28): Xaa can be any naturally occurring amino acid
  misc_feature (32)..(33): Xaa can be any naturally occurring amino acid
  misc_feature (35)..(36): Xaa can be any naturally occurring amino acid
AEAKYAKEXDXAXXEIXXLPNLXXXQXXAFIXXLXXDPSQSSELLAEAKKLSDSQAPK

SEQ ID NO: 1279 - protein, 58 aa, ARTIFICIAL SEQUENCE
  Engineered IL-17A binding polypeptide
  misc_feature (9)..(9): Xaa can be any naturally occurring amino acid
  misc_feature (11)..(11): Xaa can be any naturally occurring amino acid
  misc_feature (13)..(14): Xaa can be any naturally occurring amino acid
  misc_feature (17)..(18): Xaa can be any naturally occurring amino acid
  misc_feature (23)..(25): Xaa can be any naturally occurring amino acid
  misc_feature (27)..(28): Xaa can be any naturally occurring amino acid
  misc_feature (32)..(33): Xaa can be any naturally occurring amino acid
  misc_feature (35)..(36): Xaa can be any naturally occurring amino acid
AEAKYAKEXDXAXXEIXXLPNLXXXQXXAFIXXLXXDPSQSSELLAEAKKLSDAQAPK

SEQ ID NO: 1280 - protein, 58 aa, ARTIFICIAL SEQUENCE
  Engineered IL-17A binding polypeptide
  misc_feature (9)..(9): Xaa can be any naturally occurring amino acid
  misc_feature (11)..(11): Xaa can be any naturally occurring amino acid
  misc_feature (13)..(14): Xaa can be any naturally occurring amino acid
  misc_feature (17)..(18): Xaa can be any naturally occurring amino acid
  misc_feature (23)..(25): Xaa can be any naturally occurring amino acid
  misc_feature (27)..(28): Xaa can be any naturally occurring amino acid
  misc_feature (32)..(33): Xaa can be any naturally occurring amino acid
  misc_feature (35)..(36): Xaa can be any naturally occurring amino acid
AEAKYAKEXDXAXXEIXXLPNLXXXQXXAFIXXLXXQPEQSSELLSEAKKLSDSQAPK

SEQ ID NO: 1281 - protein, 58 aa, ARTIFICIAL SEQUENCE
  Engineered IL-17A binding polypeptide
  misc_feature (9)..(9): Xaa can be any naturally occurring amino acid
  misc_feature (11)..(11): Xaa can be any naturally occurring amino acid
  misc_feature (13)..(14): Xaa can be any naturally occurring amino acid
  misc_feature (17)..(18): Xaa can be any naturally occurring amino acid
  misc_feature (23)..(25): Xaa can be any naturally occurring amino acid
  misc_feature (27)..(28): Xaa can be any naturally occurring amino acid
  misc_feature (32)..(33): Xaa can be any naturally occurring amino acid
  misc_feature (35)..(36): Xaa can be any naturally occurring amino acid
VDAKYAKEXDXAXXEIXXLPNLXXXQXXAFIXXLXXDPSQSSELLSEAKKLNDSQAPK

SEQ ID NO: 1282 - protein, 58 aa, ARTIFICIAL SEQUENCE
  Engineered IL-17A binding polypeptide
  misc_feature (9)..(9): Xaa can be any naturally occurring amino acid
  misc_feature (11)..(11): Xaa can be any naturally occurring amino acid
  misc_feature (13)..(14): Xaa can be any naturally occurring amino acid
  misc_feature (17)..(18): Xaa can be any naturally occurring amino acid
  misc_feature (23)..(25): Xaa can be any naturally occurring amino acid
  misc_feature (27)..(28): Xaa can be any naturally occurring amino acid
  misc_feature (32)..(33): Xaa can be any naturally occurring amino acid
  misc_feature (35)..(36): Xaa can be any naturally occurring amino acid
VDAKYAKEXDXAXXEIXXLPNLXXXQXXAFIXXLXXDPSQSSELLSEAKKLSESQAPK

SEQ ID NO: 1283 - protein, 58 aa, ARTIFICIAL SEQUENCE
  Engineered IL-17A binding polypeptide
  misc_feature (9)..(9): Xaa can be any naturally occurring amino acid
  misc_feature (11)..(11): Xaa can be any naturally occurring amino acid
  misc_feature (13)..(14): Xaa can be any naturally occurring amino acid
  misc_feature (17)..(18): Xaa can be any naturally occurring amino acid
  misc_feature (23)..(25): Xaa can be any naturally occurring amino acid
  misc_feature (27)..(28): Xaa can be any naturally occurring amino acid
  misc_feature (32)..(33): Xaa can be any naturally occurring amino acid
  misc_feature (35)..(36): Xaa can be any naturally occurring amino acid
VDAKYAKEXDXAXXEIXXLPNLXXXQXXAFIXXLXXDPSQSSELLAEAKKLSEAQAPK

SEQ ID NO: 1284 - protein, 58 aa, ARTIFICIAL SEQUENCE
  Engineered IL-17A binding polypeptide
  misc_feature (9)..(9): Xaa can be any naturally occurring amino acid
  misc_feature (11)..(11): Xaa can be any naturally occurring amino acid
  misc_feature (13)..(14): Xaa can be any naturally occurring amino acid
  misc_feature (17)..(18): Xaa can be any naturally occurring amino acid
  misc_feature (23)..(25): Xaa can be any naturally occurring amino acid
  misc_feature (27)..(28): Xaa can be any naturally occurring amino acid
  misc_feature (32)..(33): Xaa can be any naturally occurring amino acid
  misc_feature (35)..(36): Xaa can be any naturally occurring amino acid
VDAKYAKEXDXAXXEIXXLPNLXXXQXXAFIXXLXXQPEQSSELLSEAKKLSESQAPK

SEQ ID NO: 1285 - protein, 58 aa, ARTIFICIAL SEQUENCE
  Engineered IL-17A binding polypeptide
  misc_feature (9)..(9): Xaa can be any naturally occurring amino acid
  misc_feature (11)..(11): Xaa can be any naturally occurring amino acid
  misc_feature (13)..(14): Xaa can be any naturally occurring amino acid
  misc_feature (17)..(18): Xaa can be any naturally occurring amino acid
  misc_feature (23)..(25): Xaa can be any naturally occurring amino acid
  misc_feature (27)..(28): Xaa can be any naturally occurring amino acid
  misc_feature (32)..(33): Xaa can be any naturally occurring amino acid
  misc_feature (35)..(36): Xaa can be any naturally occurring amino acid
VDAKYAKEXDXAXXEIXXLPNLXXXQXXAFIXXLXXDPSQSSELLSEAKKLESSQAPK

SEQ ID NO: 1286 - protein, 58 aa, ARTIFICIAL SEQUENCE
  Engineered IL-17A binding polypeptide
  misc_feature (9)..(9): Xaa can be any naturally occurring amino acid
  misc_feature (11)..(11): Xaa can be any naturally occurring amino acid
  misc_feature (13)..(14): Xaa can be any naturally occurring amino acid
  misc_feature (17)..(18): Xaa can be any naturally occurring amino acid
  misc_feature (23)..(25): Xaa can be any naturally occurring amino acid
  misc_feature (27)..(28): Xaa can be any naturally occurring amino acid
  misc_feature (32)..(33): Xaa can be any naturally occurring amino acid
  misc_feature (35)..(36): Xaa can be any naturally occurring amino acid
VDAKYAKEXDXAXXEIXXLPNLXXXQXXAFIXXLXXDPSQSSELLAEAKKLESAQAPK

SEQ ID NO: 1287 - protein, 58 aa, ARTIFICIAL SEQUENCE
  Engineered IL-17A binding polypeptide
  misc_feature (9)..(9): Xaa can be any naturally occurring amino acid
  misc_feature (11)..(11): Xaa can be any naturally occurring amino acid
  misc_feature (13)..(14): Xaa can be any naturally occurring amino acid
  misc_feature (17)..(18): Xaa can be any naturally occurring amino acid
  misc_feature (23)..(25): Xaa can be any naturally occurring amino acid
  misc_feature (27)..(28): Xaa can be any naturally occurring amino acid
  misc_feature (32)..(33): Xaa can be any naturally occurring amino acid
  misc_feature (35)..(36): Xaa can be any naturally occurring amino acid
VDAKYAKEXDXAXXEIXXLPNLXXXQXXAFIXXLXXQPEQSSELLSEAKKLESSQAPK

SEQ ID NO: 1288 - protein, 58 aa, ARTIFICIAL SEQUENCE
  Engineered IL-17A binding polypeptide
  misc_feature (9)..(9): Xaa can be any naturally occurring amino acid
  misc_feature (11)..(11): Xaa can be any naturally occurring amino acid
  misc_feature (13)..(14): Xaa can be any naturally occurring amino acid
  misc_feature (17)..(18): Xaa can be any naturally occurring amino acid
  misc_feature (23)..(25): Xaa can be any naturally occurring amino acid
  misc_feature (27)..(28): Xaa can be any naturally occurring amino acid
  misc_feature (32)..(33): Xaa can be any naturally occurring amino acid
  misc_feature (35)..(36): Xaa can be any naturally occurring amino acid
VDAKYAKEXDXAXXEIXXLPNLXXXQXXAFIXXLXXDPSQSSELLSEAKKLSDSQAPK

SEQ ID NO: 1289 - protein, 58 aa, ARTIFICIAL SEQUENCE
  Engineered IL-17A binding polypeptide
  misc_feature (9)..(9): Xaa can be any naturally occurring amino acid
  misc_feature (11)..(11): Xaa can be any naturally occurring amino acid
  misc_feature (13)..(14): Xaa can be any naturally occurring amino acid
  misc_feature (17)..(18): Xaa can be any naturally occurring amino acid
  misc_feature (23)..(25): Xaa can be any naturally occurring amino acid
  misc_feature (27)..(28): Xaa can be any naturally occurring amino acid
  misc_feature (32)..(33): Xaa can be any naturally occurring amino acid
  misc_feature (35)..(36): Xaa can be any naturally occurring amino acid
VDAKYAKEXDXAXXEIXXLPNLXXXQXXAFIXXLXXDPSQSSELLAEAKKLSDSQAPK

SEQ ID NO: 1290 - protein, 58 aa, ARTIFICIAL SEQUENCE
  Engineered IL-17A binding polypeptide
  misc_feature (9)..(9): Xaa can be any naturally occurring amino acid
  misc_feature (11)..(11): Xaa can be any naturally occurring amino acid
  misc_feature (13)..(14): Xaa can be any naturally occurring amino acid
  misc_feature (17)..(18): Xaa can be any naturally occurring amino acid
  misc_feature (23)..(25): Xaa can be any naturally occurring amino acid
  misc_feature (27)..(28): Xaa can be any naturally occurring amino acid
  misc_feature (32)..(33): Xaa can be any naturally occurring amino acid
  misc_feature (35)..(36): Xaa can be any naturally occurring amino acid
VDAKYAKEXDXAXXEIXXLPNLXXXQXXAFIXXLXXDPSQSSELLAEAKKLSDAQAPK

SEQ ID NO: 1291 - protein, 58 aa, ARTIFICIAL SEQUENCE
  Engineered IL-17A binding polypeptide
  misc_feature (9)..(9): Xaa can be any naturally occurring amino acid
  misc_feature (11)..(11): Xaa can be any naturally occurring amino acid
  misc_feature (13)..(14): Xaa can be any naturally occurring amino acid
  misc_feature (17)..(18): Xaa can be any naturally occurring amino acid
  misc_feature (23)..(25): Xaa can be any naturally occurring amino acid
  misc_feature (27)..(28): Xaa can be any naturally occurring amino acid
  misc_feature (32)..(33): Xaa can be any naturally occurring amino acid
  misc_feature (35)..(36): Xaa can be any naturally occurring amino acid
VDAKYAKEXDXAXXEIXXLPNLXXXQXXAFIXXLXXQPEQSSELLSEAKKLSDSQAPK

SEQ ID NO: 1292 - protein, 58 aa, ARTIFICIAL SEQUENCE
  Engineered IL-17A binding polypeptide
  misc_feature (9)..(9): Xaa can be any naturally occurring amino acid
  misc_feature (11)..(11): Xaa can be any naturally occurring amino acid
  misc_feature (13)..(14): Xaa can be any naturally occurring amino acid
  misc_feature (17)..(18): Xaa can be any naturally occurring amino acid
  misc_feature (23)..(25): Xaa can be any naturally occurring amino acid
  misc_feature (27)..(28): Xaa can be any naturally occurring amino acid
  misc_feature (32)..(33): Xaa can be any naturally occurring amino acid
  misc_feature (35)..(36): Xaa can be any naturally occurring amino acid
VDAKYAKEXDXAXXEIXXLPNLXXXQXXAFIXXLXXDPSQSSELLAEAKKLNKAQAPK

SEQ ID NO: 1293 - protein, 58 aa, ARTIFICIAL SEQUENCE
  Engineered IL-17A binding polypeptide
  misc_feature (9)..(9): Xaa can be any naturally occurring amino acid
  misc_feature (11)..(11): Xaa can be any naturally occurring amino acid
  misc_feature (13)..(14): Xaa can be any naturally occurring amino acid
  misc_feature (17)..(18): Xaa can be any naturally occurring amino acid
  misc_feature (23)..(25): Xaa can be any naturally occurring amino acid
  misc_feature (27)..(28): Xaa can be any naturally occurring amino acid
  misc_feature (32)..(33): Xaa can be any naturally occurring amino acid
  misc_feature (35)..(36): Xaa can be any naturally occurring amino acid
AEAKYAKEXDXAXXEIXXLPNLXXXQXXAFIXXLXXDPSQSSELLAEAKKLNKAQAPK

SEQ ID NO: 1294 - protein, 58 aa, ARTIFICIAL SEQUENCE
  Engineered IL-17A binding polypeptide
  misc_feature (9)..(9): Xaa can be any naturally occurring amino acid
  misc_feature (11)..(11): Xaa can be any naturally occurring amino acid
  misc_feature (13)..(14): Xaa can be any naturally occurring amino acid
  misc_feature (17)..(18): Xaa can be any naturally occurring amino acid
  misc_feature (23)..(25): Xaa can be any naturally occurring amino acid
  misc_feature (27)..(28): Xaa can be any naturally occurring amino acid
  misc_feature (32)..(33): Xaa can be any naturally occurring amino acid
  misc_feature (35)..(36): Xaa can be any naturally occurring amino acid
ADAKYAKEXDXAXXEIXXLPNLXXXQXXAFIXXLXXDPSQSSELLSEAKKLNDSQAPK

1. An IL-17A binding polypeptide, comprising an IL-17A binding motif BM, which motif consists of an amino acid sequence selected from:
i) EX₂DX₄AX₆X₇EIX₁₀X₁₁LPNL X₁₆X₁₇X₁₈QX₂₀X₂₁AFIX₂₅ X₂₆LX₂₈X₂₉
wherein, independently from each other,
X₂ is selected from A, H, M and Y;
X₄ is selected from A, D, E, F, K, L, M, N, Q, R, S and Y;
X₆ is selected from A, Q and W;
X₇ is selected from F, I, L, M, V, W and Y;
X₁₀ is selected from A and W;
X₁₁ is selected from A, D, E, F, G, L, M, N, Q, S, T and Y;
X₁₆ is selected from N and T;
X₁₇ is selected from H, W and Y;
X₁₈ is selected from A, D, E, H and V;
X₂₀ is selected from A, G, Q, S and W;
X₂₁ is selected from A, D, E, F, H, K, N, R, T, V, W and Y;
X₂₅ is selected from A, D, E, G, H, I, L, M, N, Q, R, S, T and V;
X₂₆ is selected from K and S;
X₂₈ is selected from I, L, N and R; and
X₂₉ is selected from D and R;
and
ii) an amino acid sequence which has at least 89% identity to the sequence defined in i).

2. An IL-17A binding polypeptide according to claim 1, wherein, in sequence i),
X₂ is selected from A, H and M;
X₄ is selected from A, D, E, F, L, M, N, Q, R and Y;
X₁₁ is selected from A, D, E, F, G, L, M, N, S, T and Y;
X₁₈ is selected from A, D, E and V;
X₂₀ is selected from A, G, Q and W;
X₂₁ is selected from E, F, H, N, R, T, V, W and Y;
X₂₅ is selected from A, D, E, G, H, I, L, N, Q, R, S, T and V; and
X₂₈ is selected from I, N and R.

3. An IL-17A binding polypeptide according to claim 2, wherein, in sequence i),
X₁₆ is T;
X₁₇ is W;
X₂₁ is selected from E, F, H, W, T and Y;
X₂₅ is selected from A, D, E, G, H, I, L, N, Q, R, S and T;
X₂₆ is K; and
X₂₉ is D.

4. An IL-17A binding polypeptide according to claim 1, wherein sequence i) is the sequence from position 8 to position 36 in a sequence selected from the group consisting of SEQ ID NO:1-1216.

5. An IL-17A binding polypeptide according to claim 1, which comprises an amino acid sequence binding module, BMod, selected from:
iii) K-[BM]-DPSQS XₐX_{b}LLX_{c} EAKKL X_{d}XₑX_{f}Q;
wherein
[BM] is an IL-17A binding motif as defined in any one of claims 1-4 provided that X₂₉ is D;
Xₐ is selected from A and S;
X_{b} is selected from N and E;
X_{c} is selected from A, S and C;
X_{d} is selected from E, N and S;
Xₑ is selected from D, E and S;
X_{f} is selected from A and S; and
iv) an amino acid sequence which has at least 85% identity to a sequence defined by iii).

6. An IL-17A binding polypeptide according to claim 5, wherein said sequence iii) is the sequence from position 7 to position 55 in a sequence selected from the group consisting of SEQ ID NO:1-1216.

7. An IL-17A binding polypeptide according to claim 1, which comprises an amino acid sequence selected from:
vii) YA-[BMod]-AP;
wherein [BMod] is an IL-17A binding module as defined in any one of claims 5-6; and
viii) an amino acid sequence which has at least 86% identity to a sequence defined by vii).

8. An IL-17A binding polypeptide according to claim 1, which comprises an amino acid sequence selected from:

| | |
|---|---|
| xiii) | VDAKYAK-[BM]-DPSQSSELLSEAKKLNDSQAPK; |

wherein [BM] is an IL-17A binding motif as defined in any one of claims 1-4; and
xiv) an amino acid sequence which has at least 86% identity to the sequence defined in xiii).

9. An IL-17A binding polypeptide according to claim 8, wherein sequence xiii) is selected from SEQ ID NO:1-1216.

10. An IL-17A binding polypeptide according to claim 1, which comprises an amino acid sequence selected from:

| | |
|---|---|
| xv) | AEAKYAK-[BM]-DPSQSSELLSEAKKLNDSQAPK; |

wherein [BM] is an IL-17A binding motif as defined in any one of claims 1-4; and
xvi) an amino acid sequence which has at least 86% identity to the sequence defined in xv).

11. An IL-17A binding polypeptide according to claim 10, wherein sequence xv) is selected from SEQ ID NO:1217-1222.

12. An IL-17A binding polypeptide according to claim 1, which is capable of binding to IL-17A such that the K_{D} value of the interaction is at most 1×10⁻⁶ M, such as at most 1×10⁻⁷ M, such as at most 1×10⁻⁸ M, such as at most 1×10⁻⁹ M.

13. A Fusion protein or conjugate comprising
a first moiety consisting of an IL-17A binding polypeptide according to claim 1; and
a second moiety consisting of a polypeptide having a desired biological activity.

14. A Complex, comprising at least one IL-17A binding polypeptide according to claim 1 or at least one fusion protein or conjugate according to claim 13, and at least one antibody or an antigen binding fragment thereof.

15. A Polynucleotide encoding a polypeptide according to claim 1.

16. A Composition comprising an IL-17A binding polypeptide, fusion protein, conjugate or complex according to claim 1 and at least one pharmaceutically acceptable excipient or carrier.

17. (canceled)

18. A medicament, diagnostic agent or prognostic agent comprising an IL-17A binding polypeptide, fusion protein, conjugate or complex or composition according to claim 1.
